(19) United States
(12) Patent Application Publication
(10) Pub. No.: US 2024/0026392 A1
(43) Pub. Date: Jan. 25, 2024

(54) BIOSYNTHESIS OF CANNABINOIDS AND CANNABINOID PRECURSORS

(71) Applicant: Ginkgo Bioworks, Inc., Boston, MA (US)

(72) Inventors: Kim Cecelia Anderson, Somerville, MA (US); Jeffrey Ian Boucher, Allston, MA (US); Elena Brevnova, Winchester, MA (US); Brian Carvalho, Somerville, MA (US); Nicholas Flores, Cambridge, MA (US); Katrina Forrest, Seattle, WA (US); Fiona Qu, Boston, MA (US); Gabriel Rodrigues, Central, SC (US); Michelle Spencer, Boston, MA (US)

(73) Assignee: Ginkgo Bioworks, Inc., Boston, MA (US)

(21) Appl. No.: 18/015,046

(22) PCT Filed: Jul. 8, 2021
(86) PCT No.: PCT/US2021/040941

§ 371 Date: Jan. 6, 2023

Related U.S. Application Data
(60) Provisional application No. 63/067,840, filed on Aug. 19, 2020.
(60) Provisional application No. 63/049,546, filed on Jul. 8, 2020.

(51) Int. Cl. C12P 7/42; C12P 7/22; C12N 15/81

(52) U.S. Cl. CPC C12P 7/42; C12P 7/22; C12N 15/81; C12Y 121/03008; C12Y 404/01026; C12Y 205/0101; C12Y 203/01206; C12N 2800/102

(57) ABSTRACT

Aspects of the disclosure relate to biosynthesis of cannabinoids and cannabinoid precursors in recombinant cells and in vitro, and to variant terminal synthases having altered catalytic activity to synthesize THC-type, CBD-type and/or CBC-type cannabinoids.

### CROSS REFERENCE TO RELATED APPLICATION

[0001] This application claims the benefit under 35 U.S.C. § 119(e) of U.S. Provisional Application No. 63/049,546 filed Jul. 8, 2020, entitled “BIOSYNTHESIS OF CANNABINOIDS AND CANNABINOID PRECURSORS,” and U.S. Provisional Application No. 63/067,840 filed Aug. 19, 2020, entitled “BIOSYNTHESIS OF CANNABINOIDS AND CANNABINOID PRECURSORS,” the entire disclosure of each of which is hereby incorporated by reference in its entirety.

### REFERENCE TO A SEQUENCE LISTING SUBMITTED AS A TEXT FILE VIA EFS-WEB

[0002] The instant application contains a Sequence Listing which has been submitted in ASCH format via EFS-Web and is hereby incorporated by reference in its entirety. The ASCII file, created on Jul. 8, 2021, is named G091970065WO00-SEQ-EAS.txt and is 3,909,600 bytes in size.

### FIELD OF INVENTION

[0003] The present disclosure relates to the biosynthesis of cannabinoids and cannabinoid precursors, such as in recombinant cells.

### BACKGROUND

[0004] Cannabinoids are chemical compounds that may act as ligands for endocannabinoid receptors and have multiple medical applications. Traditionally, cannabinoids have been isolated from plants of the genus Cannabis. The use of plants for producing cannabinoids is inefficient, however, with isolated products often limited to the two most prevalent endogenous cannabinoids, THC and CBD, as other cannabinoids are typically produced in very low concentrations in Cannabis plants. Further, the cultivation of Cannabis plants is restricted in many jurisdictions. In addition, in order to obtain consistent results, Cannabis plants are often grown in a controlled environment, such as indoor grow rooms without windows, to provide flexibility in modulating growing conditions such as lighting, temperature, humidity, airflow, etc. Growing Cannabis plants in such controlled environments can result in high energy usage per gram of cannabinoid produced, especially for rare cannabinoids that the plants produce only in small amounts. For example, lighting in such grow rooms is provided by artificial sources, such as high-powered sodium lights. As many species of Cannabis have a vegetative cycle that requires 18 or more hours of light per day, powering such lights can result in significant energy expenditures. It has been estimated that between 0.88-1.34 kWh of energy is required to produce one gram of THC in dried Cannabis flower form (e.g., before any extraction or purification). Additionally, concern has been raised over agricultural practices in certain jurisdictions, such as California, where the growing season coincides with the dry season such that the water usage may impact connected surface water in streams (Dillis, Christopher, Connor McIntee, Van Butsic, Lance Le, Kason Grady, and Theodore Grantham. “Water storage and irrigation practices for cannabis drive seasonal patterns of water extraction and use in Northern California.” Journal of Environmental Management 272 (2020): 110955).

[0005] Cannabinoids can be produced through chemical synthesis (see, e.g., U.S. Pat. No. 7,323,576 to Souza et al). However, such methods suffer from low yields and high cost. Production of cannabinoids, cannabinoid analogs, and cannabinoid precursors using engineered organisms may provide an advantageous approach to meet the increasing demand for these compounds.

### SUMMARY

[0006] Aspects of the present disclosure provide methods for production of cannabinoids and cannabinoid precursors from fatty acid substrates using genetically modified host cells.

[0007] Aspects of the disclosure relate to host cells that comprise a heterologous polynucleotide encoding a terminal synthase (TS), wherein relative to the sequence of SEQ ID NO: 14, the TS comprises an amino acid substitution at one or more residues corresponding to positions 36, 44, 47, 52, 58, 76, 85, 88, 89, 95, 129, 136, 150, 158, 181, 211, 237, 242, 247, 255, 267, 268, 273, 274, 288, 302, 309, 318, 329, 340, 344, 345, 351, 360, 361, 363, 379, 382, 396, 419, 424, 443, 459, 462, 464, 469, 479, 475, 491, 492, and/or 499 in SEQ ID NO: 14, and wherein the TS is capable of producing a THC-type cannabinoid.

[0008] In some embodiments, relative to the sequence of SEQ ID NO: 14, the TS further comprises an amino acid substitution at one or more residues corresponding to positions 31, 40, 41, 46, 49, 51, 56, 59, 61, 63, 74, 90, 96, 100, 103, 116, 143, 173, 196, 250, 257, 290, 296, 311, 354, 377, 378, 411, 417, 446, 494, 495, 528, 542, 543 and/or 544 in SEQ ID NO: 14. In some embodiments, the TS is capable of producing more of a THC-type cannabinoid than a control TS, wherein the control TS comprises the sequence of SEQ ID NO: 284 or SEQ ID NO: 21. In some embodiments, a control TS, or a polynucleotide encoding a control TS, comprises the sequence of any one of SEQ ID NOs: 20, 21, 22, 23, 24, 14, 284, 254, or 1220.

[0009] Further aspects of the disclosure relate to host cells that comprise a heterologous polynucleotide encoding a TS, wherein relative to the sequence of SEQ ID NO: 14, the TS comprises an amino acid substitution at one or more residues corresponding to positions 31, 36, 40, 41, 44, 46, 47, 49, 51, 52, 56, 58, 59, 61, 63, 74, 76, 85, 88, 89, 90, 95, 96, 100, 103, 116, 129, 136, 143, 150, 158, 173, 181, 196, 211, 237, 242, 247, 250, 255, 257, 267, 268, 273, 274, 288, 290, 296, 302, 309, 311, 318, 329, 340, 344, 345, 351, 354, 360, 361, 363, 377, 378, 379, 382, 396,411, 417, 419, 424, 443, 446,459, 462, 464, 469, 479, 475, 491, 492, 494, 495, 499, 528, 542, 543, and/or 544 in SEQ ID NO: 14, wherein the TS does not comprise SEQ ID NO: 20, 21, 320 or 321, wherein the TS is capable of producing more of a THC-type cannabinoid than a control TS, and wherein the control TS comprises the sequence of SEQ ID NO: 284 or SEQ ID NO: 21. In some embodiments, a control TS, or a polynucleotide encoding a control TS, comprises the sequence of any one of SEQ ID NOs: 20, 21, 22, 23, 24, 14, 284, 254, or 1220.

[0010] In some embodiments, the THC-type cannabinoid is tetrahydrocannabinolic acid (THCA) and/or tetrahydrocannabivarinic acid (THCVA). In some embodiments, the TS is capable of producing at least 0.05%, 0.075%, 0.1%, 0.5%, 0.75%, 1%, 5%, 10%, 20%, 30%, 40%, 50%, 60%, 70%, 80%, 90%, 120%, 150%, 170%, 200%, 240%, 290%, or 300% more of a THC-type cannabinoid than a control TS, wherein the control TS comprises the sequence of SEQ ID NO: 284 or SEQ ID NO: 21. In some embodiments, the TS is capable of producing at least 1, 2, 3, or 4-fold more of a THC-type cannabinoid than a control TS, wherein the control TS comprises the sequence of SEQ ID NO: 284 or SEQ ID NO: 21. In some embodiments, a control TS, or a polynucleotide encoding a control TS, comprises the sequence of any one of SEQ ID NOs: 20, 21, 22, 23, 24, 14, 284, 254, or 1220.

[0011] In some embodiments, the TS comprises: the amino acid Q at a residue corresponding to position 31 in SEQ ID NO: 14; the amino acid H or Q at a residue corresponding to position 36 in SEQ ID NO: 14; the amino acid E or Q at a residue corresponding to position 40 in SEQ ID NO: 14; the amino acid Y at a residue corresponding to position 41 in SEQ ID NO: 14; the amino acid T at a residue corresponding to position 44 in SEQ ID NO: 14; the amino acid A or P at a residue corresponding to position 46 in SEQ ID NO: 14; the amino acid T at a residue corresponding to position 47 in SEQ ID NO: 14; the amino acid A at a residue corresponding to position 49 in SEQ ID NO: 14; the amino acid F at a residue corresponding to position 51 in SEQ ID NO: 14; the amino acid I at a residue corresponding to position 52 in SEQ ID NO: 14; the amino acid N at a residue corresponding to position 56 in SEQ ID NO: 14; the amino acid P or S at a residue corresponding to position 58 in SEQ ID NO: 14; the amino acid F at a residue corresponding to position 59 in SEQ ID NO: 14; the amino acid S at a residue corresponding to position 61 in SEQ ID NO: 14; the amino acid L or V at a residue corresponding to position 63 in SEQ ID NO: 14; the amino acid T at a residue corresponding to position 74 in SEQ ID NO: 14; the amino acid N at a residue corresponding to position 76 in SEQ ID NO: 14; the amino acid I at a residue corresponding to position 85 in SEQ ID NO: 14; the amino acid L at a residue corresponding to position 88 in SEQ ID NO: 14; the amino acid D, E, or H at a residue corresponding to position 89 in SEQ ID NO: 14; the amino acid E or V at a residue corresponding to position 90 in SEQ ID NO: 14; the amino acid G at a residue corresponding to position 95 in SEQ ID NO: 14; the amino acid S at a residue corresponding to position 96 in SEQ ID NO: 14; the amino acid A at a residue corresponding to position 100 in SEQ ID NO: 14; the amino acid I at a residue corresponding to position 103 in SEQ ID NO: 14; the amino acid S at a residue corresponding to position 116 in SEQ ID NO: 14; the amino acid I at a residue corresponding to position 129 in SEQ ID NO: 14; the amino acid R at a residue corresponding to position 136 in SEQ ID NO: 14; the amino acid E at a residue corresponding to position 143 in SEQ ID NO: 14; the amino acid Q at a residue corresponding to position 150 in SEQ ID NO: 14; the amino acid L at a residue corresponding to position 158 in SEQ ID NO: 14, the amino acid A at a residue corresponding to position 173 in SEQ ID NO: 14; the amino acid A at a residue corresponding to position 181 in SEQ ID NO: 14; the amino acid K at a residue corresponding to position 196 in SEQ ID NO: 14; the amino acid D at a residue corresponding to position 211 in SEQ ID NO: 14; the amino acid S at a residue corresponding to position 237 in SEQ ID NO: 14; the amino acid V at a residue corresponding to position 242 in SEQ ID NO: 14; the amino acid R at a residue corresponding to position 247 in SEQ ID NO: 14; the amino acid D or P at a residue corresponding to position 250 in SEQ ID NO: 14; the amino acid V at a residue corresponding to position 255 in SEQ ID NO: 14; the amino acid M or R at a residue corresponding to position 257 in SEQ ID NO: 14; the amino acid N at a residue corresponding to position 267 in SEQ ID NO: 14: the amino acid E at a residue corresponding to position 268 in SEQ ID NO: 14; the amino acid V at a residue corresponding to position 273 in SEQ ID NO: 14; the amino acid H at a residue corresponding to position 274 in SEQ ID NO: 14; the amino acid L, M, or T at a residue corresponding to position 288 in SEQ ID NO: 14; the amino acid F at a residue corresponding to position 290 in SEQ ID NO: 14; the amino acid R at a residue corresponding to position 296 in SEQ ID NO: 14; the amino acid Q at a residue corresponding to position 302 in SEQ ID NO: 14; the amino acid I at a residue corresponding to position 309 in SEQ ID NO: 14; the amino acid S at a residue corresponding to position 311 in SEQ ID NO: 14; the amino acid L at a residue corresponding to position 318 in SEQ ID NO: 14; the amino acid Q at a residue corresponding to position 329 in SEQ ID NO: 14; the amino acid E at a residue corresponding to position 340 in SEQ ID NO: 14; the amino acid Q at a residue corresponding to position 344 in SEQ ID NO: 14; the amino acid L or M at a residue corresponding to position 345 in SEQ ID NO: 14; the amino acid I at a residue corresponding to position 351 in SEQ ID NO: 14; the amino acid F at a residue corresponding to position 354 in SEQ ID NO: 14; the amino acid Y at a residue corresponding to position 360 in SEQ ID NO: 14; the amino acid D at a residue corresponding to position 361 in SEQ ID NO: 14; the amino acid T at a residue corresponding to position 363 in SEQ ID NO: 14; the amino acid Q at a residue corresponding to position 377 in SEQ ID NO: 14; the amino acid N at a residue corresponding to position 378 in SEQ ID NO: 14; the amino acid A at a residue corresponding to position 379 in SEQ ID NO: 14; the amino acid K at a residue corresponding to position 382 in SEQ ID NO: 14; the amino acid V at a residue corresponding to position 396 in SEQ ID NO: 14; the amino acid V at a residue corresponding to position 411 in SEQ ID NO: 14; the amino acid V at a residue corresponding to position 417 in SEQ ID NO: 14; the amino acid F at a residue corresponding to position 419 in SEQ ID NO: 14; the amino acid D at a residue corresponding to position 424 in SEQ ID NO: 14; the amino acid I at a residue corresponding to position 443 in SEQ ID NO: 14; the amino acid I at a residue corresponding to position 446 in SEQ ID NO: 14; the amino acid L at a residue corresponding to position 459 in SEQ ID NO: 14; the amino acid I at a residue corresponding to position 462 in SEQ ID NO: 14: the amino acid N at a residue corresponding to position 464 in SEQ ID NO: 14; the amino acid M at a residue corresponding to position 469 in SEQ ID NO: 14; the amino acid K at a residue corresponding to position 475 in SEQ ID NO: 14; the amino acid M at a residue corresponding to position 479 in SEQ ID NO: 14; the amino acid M at a residue corresponding to position 491 in SEQ ID NO: 14; the amino acid N at a residue corresponding to position 492 in SEQ ID NO: 14; the amino acid D, E, F, or P at a residue corresponding to position 494 in SEQ ID NO: 14; the amino acid E or K at a residue corresponding to position 495 in SEQ ID NO: 14; the amino acid Q at a residue corresponding to position 499 in SEQ ID NO: 14; the amino acid D at a residue corresponding to position 528 in SEQ ID NO: 14; the amino acid L or R at a residue corresponding to position 542 in SEQ ID NO: 14; the amino acid R at a residue corresponding to position 543 in SEQ ID NO: 14, and/or the amino acid R at a residue corresponding to position 544 in SEQ ID NO: 14.

[0012] In some embodiments, the TS comprises: the amino acid H or Q at a residue corresponding to position 36 in SEQ ID NO: 14; the amino acid T at a residue corresponding to position 44 in SEQ ID NO: 14; the amino acid T at a residue corresponding to position 47 in SEQ ID NO: 14; the amino acid I at a residue corresponding to position 52 in SEQ ID NO: 14; the amino acid P or S at a residue corresponding to position 58 in SEQ ID NO: 14; the amino acid I at a residue corresponding to position 85 in SEQ ID NO: 14; the amino acid L at a residue corresponding to position 88 in SEQ ID NO: 14; the amino acid D, E, or H at a residue corresponding to position 89 in SEQ ID NO: 14; the amino acid G at a residue corresponding to position 95 in SEQ ID NO: 14; the amino acid I at a residue corresponding to position 129 in SEQ ID NO: 14; the amino acid R at a residue corresponding to position 136 in SEQ ID NO: 14; the amino acid Q at a residue corresponding to position 150 in SEQ ID NO: 14; the amino acid L at a residue corresponding to position 158 in SEQ ID NO: 14; the amino acid A at a residue corresponding to position 181 in SEQ ID NO: 14; the amino acid D at a residue corresponding to position 211 in SEQ ID NO: 14; the amino acid S at a residue corresponding to position 237 in SEQ ID NO: 14; the amino acid V at a residue corresponding to position 242 in SEQ ID NO: 14; the amino acid R at a residue corresponding to position 247 in SEQ ID NO: 14; the amino acid V at a residue corresponding to position 255 in SEQ ID NO: 14; the amino acid N at a residue corresponding to position 267 in SEQ ID NO: 14, the amino acid E at a residue corresponding to position 268 in SEQ ID NO: 14; the amino acid V at a residue corresponding to position 273 in SEQ ID NO: 14; the amino acid H at a residue corresponding to position 274 in SEQ ID NO: 14; the amino acid L, M, or T at a residue corresponding to position 288 in SEQ ID NO: 14; the amino acid Q at a residue corresponding to position 302 in SEQ ID NO: 14; the amino acid I at a residue corresponding to position 309 in SEQ ID NO: 14; the amino acid L at a residue corresponding to position 318 in SEQ ID NO: 14; the amino acid Q at a residue corresponding to position 329 in SEQ ID NO: 14; the amino acid E at a residue corresponding to position 340 in SEQ ID NO: 14; the amino acid Q at a residue corresponding to position 344 in SEQ ID NO: 14; the amino acid L or M at a residue corresponding to position 345 in SEQ ID NO: 14; the amino acid I at a residue corresponding to position 351 in SEQ ID NO: 14; the amino acid Y at a residue corresponding to position 360 in SEQ ID NO: 14; the amino acid D at a residue corresponding to position 361 in SEQ ID NO: 14; the amino acid T at a residue corresponding to position 363 in SEQ ID NO: 14; the amino acid A at a residue corresponding to position 379 in SEQ ID NO: 14; the amino acid K at a residue corresponding to position 382 in SEQ ID NO: 14; the amino acid V at a residue corresponding to position 396 in SEQ ID NO: 14; the amino acid F at a residue corresponding to position 419 in SEQ ID NO: 14; the amino acid D at a residue corresponding to position 424 in SEQ ID NO: 14; the amino acid I at a residue corresponding to position 443 in SEQ ID NO: 14; the amino acid L at a residue corresponding to position 459 in SEQ ID NO: 14; the amino acid I at a residue corresponding to position 462 in SEQ ID NO: 14; the amino acid N at a residue corresponding to position 464 in SEQ ID NO: 14; the amino acid M at a residue corresponding to position 469 in SEQ ID NO: 14; the amino acid M at a residue corresponding to position 479 in SEQ ID NO: 14; the amino acid M at a residue corresponding to position 491 in SEQ ID NO: 14; the amino acid N at a residue corresponding to position 492 in SEQ ID NO: 14; and/or the amino acid Q at a residue corresponding to position 499 in SEQ ID NO: 14.

[0013] In some embodiments, the TS comprises at least 2, 3, 4, 5, 6, 7, 8, 9, 10, 11, 12, 13, 14, 15, or 16 amino acid substitutions at residues corresponding to positions 31, 36, 40, 41, 44, 46, 47, 49, 51, 52, 56, 58, 59, 61, 63, 74, 76, 85, 88, 89, 90, 95, 96, 100, 103, 116, 129, 136, 143, 150, 158, 173, 181, 196, 211, 237, 242, 247, 250, 255, 257, 267, 268, 273, 274, 288, 290, 296, 302, 309, 311, 318, 329, 340, 344, 345, 351, 354, 360, 361, 363, 377, 378, 379, 382, 396, 411, 417, 419, 424, 443, 446, 459, 462, 464, 469, 479, 475, 491, 492, 494, 495, 499, 528, 542, 543, and/or 544 in SEQ ID NO: 14. In some embodiments, the TS comprises at least 2, 3, 4, 5, 6, 7, 8, 9, 10, 11, 12, 13, 14, 15, or 16 amino acid substitutions at residues corresponding to positions 36, 44, 47, 52, 58, 76, 85, 88, 89, 95, 129, 136, 150, 158, 181, 211, 237, 242, 247, 255, 267, 268, 273, 274, 288, 302, 309, 318, 329, 340, 344, 345, 351, 360, 361, 363, 379, 382, 396, 419, 424, 443, 459, 462, 464, 469, 479, 475, 491, 492, and/or 499 in SEQ ID NO: 14.

[0014] In some embodiments, the TS comprises relative to SEQ ID NO: 14: R31Q, H56N, Q58S, M61 S, 174T, N90V, H143E, A250P, S255V, V288L, T340E, F345L, E424D, Q475K, T492N, and P542L; R31Q, V52I, H56N, Q58S, M61S, I74T, N90V, A250P, S255V, V288L, F345L, Q475K, and T492N; R31Q, A47T, V52I, H56N, Q58S, M61S, I74T, N90V, H143E, A250P, S255V, V288L, T340E, F345L, Q475K, and T492N; H56N, Q58S, M61S, I74T, N90V, H143E, A250D, S255V, V288L, F345L, Q475K, T492N, and A495E; R31Q, H56N, Q58S, M61S, I74T, N90V, H143E, A250P, S255V, V288L, Q475K, and T492N; R31Q, A47T, H56N, Q58S, M61S, I74T, N90V, H143E, A250P, S255V, V288L, T340E, F345L, E424D, Q475K, and T492N; A47T, H56N, Q58S, M61S, I74T, N90V, A250D, S255V, F345L, E424D, Q475K, and T492N; R31Q, A47T, H56N, Q58S, M61S, I74T, N90V, A250P, S255V, V288L, T340E, F345L, Q475K, and T492N; R31Q, A47T, H56N, Q58S, M61S, 174T, N90V, H143E, A250P, S255V, V288L, T340E, F345L, Q475K, and T492N; A47T, H56N, Q58S, M61S, I74T, N90V, A250D, S255V, F345L, Q475K, and T492N; R31Q, A47T, H56N, Q58S, M61 S, 174T, N90V, H143E, A250P, S255V, T340E, F345L, Q475K, and T492N; R31Q, H56N, Q58S, M61S, I74T, N90V, A250P, S255V, V288L, F345L, E424D, Q475K, and T492N; R31Q, A47T, H56N, Q58S, M61S, I74T, N90V, A250P, S255V, T340E, F345L, E424D, Q475K, and T492N; A47T, H56N, Q58S, M61S, I74T, N90V, A250D, S255V, V288L, F345L, Q475K, and T492N; H56N, Q58S, M61S, I74T, N90V, H143E, A250D, S255V, V288L, F345L, Q475K, and T492N; or R31Q, V52I, H56N, M61S, I74T, N90V, A250P, S255V, F345L, Q475K, and T492N.

[0015] In some embodiments, the TS comprises relative to SEQ ID NO: 14: M61S, N90V, A250D, S255V, Q475K, T492N, and A495E; H56N, M61S, 174T, N90V, A250P, S255V, T492N, and H494E; or R31Q, H56N, I74T, N90V, A250P, S255V, Q475K, T492N, H494E, and A495E.

[0016] In some embodiments, the TS comprises a sequence that is at least 90%, at least 95%, at least 97%, at least 98%, or at least 99% identical to any one of SEQ ID NOs: 505, 563, or 560. In some embodiments, the TS comprises a sequence that is at least 90%, at least 95%, at least 97%, at least 98%, or at least 99% identical to any one of SEQ ID NOs: 138, 140, 141, 144, 155, 158, 164, 178, 198-200, 203, 285-289, 290-313, 474-487, 490-491, 499, 501-502, 504-505, 512, 515-517, 521-522, 524, 526-529, 532, 534-536, 538, 542-545, 548-605, 698-802, 804-811, 813-815, 820, 824, 826, 828-832, 834, 837-838, 845, 848, 850-851, 876, and 884-913, or a conservatively substituted version thereof. In some embodiments, the TS comprises a sequence that is at least 90%, at least 95%, at least 97%, at least 98%, or at least 99% identical to any one of SEQ ID NOs: 711, 713, 715, 718, 719, 724, 726, 733, 734, 741, 765, 884, 885, 890, 891, and 900, or a conservatively substituted version thereof. In some embodiments, the TS comprises the sequence of any one of SEQ ID NOs: 138, 140, 141, 144, 155, 158, 164, 178, 198-200, 203, 285-289, 290-313, 474-487, 490-491, 499, 501-502, 504-505, 512, 515-517, 521-522, 524, 526-529, 532, 534-536, 538, 542-545, 548-605, 698-802, 804-811, 813-815, 820, 824, 826, 828-832, 834, 837-838, 845, 848, 850-851, 876, and 884-913, or a conservatively substituted version thereof.

[0017] Further aspects of the disclosure relate to host cells that comprise a heterologous polynucleotide encoding a TS, wherein the TS comprises: a sequence that is at least 97% identical to SEQ ID NO: 40; a sequence that is at least 98% identical to any one of SEQ ID NO: 37, 39, and 42; a sequence that is at least 99% identical to SEQ ID NO: 43; or a sequence comprising SEQ ID NO: 38; wherein the host cell is capable of producing a THC-type cannabinoid. In some embodiments, THC-type cannabinoid is THCA and/or THCVA. In some embodiments, the TS is capable of producing more of a THC-type cannabinoid than a control TS, wherein the control TS comprises the sequence of SEQ ID NO: 284 or SEQ ID NO: 21. In some embodiments, the TS is capable of producing at least 0.05%, 0.075%, 0.1%, 0.5%, 0.75%, 1%, 5%, 10%, 20%, 30%, 40%, 50%, 60%, 70%, 80%, 90%, 120%, 150%, 170%, 200%, 240%, 290%, or 300% more of a THC-type cannabinoid than a control TS, wherein the control TS comprises the sequence of SEQ ID NO: 284 or SEQ ID NO: 21. In some embodiments, a control TS, or a polynucleotide encoding a control TS, comprises the sequence of any one of SEQ ID NOs: 20, 21, 22, 23, 24, 14, 284, 254, or 1220.

[0018] In some embodiments, the TS further comprises a first signal peptide. In some embodiments, the first signal peptide comprises SEQ ID NO: 16 or a sequence that has no more than two amino acid substitutions, insertions, additions, or deletions relative to the sequence of SEQ ID NO: 16. In some embodiments, the first signal peptide is located at the amino terminus of the TS. In some embodiments, a methionine residue is added to the N-terminus of SEQ ID NO: 16. In some embodiments, the TS further comprises a second signal peptide. In some embodiments, the second signal peptide comprises SEQ ID NO: 17 or a sequence that has no more than one amino acid substitution, insertion, addition, or deletion relative to the sequence of SEQ ID NO: 17. In some embodiments, the second signal peptide is located at the carboxyl terminus of the TS.

[0019] In some embodiments, the host cell further produces one or more of cannabidiolic acid (CBDA), cannabidivarinic acid (CBDVA), cannabichromenic acid (CBCA) and/or cannabichromevarinic acid (CBCVA). In some embodiments, the TS produces a higher ratio of THCA:CBDA, THCA:CBCA, THCVA:CBDVA and/or THCVA:CBCVA than a control TS. In some embodiments, the control TS is a TS comprising the sequence of SEQ ID NO: 284 or SEQ ID NO: 21. In some embodiments, the TS has a higher product specificity for a THC-type cannabinoid than a control TS. In some embodiments, the control TS is a TS comprising the sequence of SEQ ID NO: 284 or SEQ ID NO: 21. In some embodiments, a control TS, or a polynucleotide encoding a control TS, comprises the sequence of any one of SEQ ID NOs: 20, 21, 22, 23, 24, 14, 284, 254, or 1220.

[0020] Further aspects of the disclosure relate to host cells that comprise a heterologous polynucleotide encoding a TS, wherein relative to the sequence of SEQ ID NO: 13, the TS comprises an amino acid substitution at one or more residues corresponding to positions 79, 90, 106, 150, 166, 184, 211, 216, 230, 263, 273, 283, 290, 292, 319, 322, 339, 353, 380, 386, 397, 407, 416, 418, 441, 442, 446, 479, 450, 452, 454, 467, 481, 486, 504, and/or 512 in SEQ ID NO: 13, wherein the TS is capable of producing a CBD-type cannabinoid.

[0021] In some embodiments, relative to the sequence of SEQ ID NO: 13, the TS further comprises an amino acid substitution at one or more residues corresponding to positions 31, 47, 49, 50, 56, 57, 58, 69, 89, 95, 100, 103, 116, 124, 143, 162, 167, 168, 171, 172, 175, 180, 196, 213, 250, 287, 343, 344, 376, 377, 378, 394, 410, 414, 415, 445, 490, 492, 517 and/or 542 in SEQ ID NO: 13. In some embodiments, the TS is capable of producing more of a CBD-type cannabinoid than a control TS, wherein the control TS comprises the sequence of SEQ ID NO. 136.

[0022] Further aspects of the disclosure relate to host cells that comprise a heterologous polynucleotide encoding a TS, wherein relative to the sequence of SEQ ID NO: 13, the TS comprises an amino acid substitution at one or more residues corresponding to positions 31, 47, 49, 50, 56, 57, 58, 69, 79, 89, 90, 95, 100, 103, 106, 116, 124, 143, 150, 162, 166, 167, 168, 171,172, 175, 180, 184, 196, 211, 213, 216, 230, 250, 263, 273, 283, 287, 290, 292, 319, 322, 339, 343, 344, 353, 376, 377, 378, 380, 386, 394, 397, 407, 410, 414, 415, 416, 418, 441, 442, 445, 446, 479, 450, 452, 454, 467, 481, 486, 490, 492, 504, 512, 527 and/or 542 in SEQ ID NO: 13, wherein the TS is capable of producing more of a CBD-type cannabinoid than a control TS, and wherein the control TS comprises the sequence of SEQ ID NO: 136.

[0023] In some embodiments, the CBD-type cannabinoid is CBDA and/or CBDVA. In some embodiments, the TS is capable of producing at least 0.05%, 0.075%, 0.1%, 0.5%, 0.75%, 1%, 5%, 10%, 20%, 30%, 40%, 50%, 60%, 70%, 80%, 90%, 120%, 150%, 170%, 200%, 240%, 290%, or 300% more of a CBD-type cannabinoid than a control TS, wherein the control TS comprises the sequence of SEQ ID NO: 136. In some embodiments, the TS is capable of producing at least 1, 2, 3, or 4-fold more of a CBD-type cannabinoid than a control TS, wherein the control TS comprises the sequence of SEQ ID NO: 136.

[0024] In some embodiments, the TS comprises: the amino acid Q at a residue corresponding to position 31 in SEQ ID NO: 13; the amino acid A at a residue corresponding to position 47 in SEQ ID NO: 13; the amino acid P at a residue corresponding to position 49 in SEQ ID NO: 13; the amino acid N at a residue corresponding to position 50 in SEQ ID NO: 13; the amino acid H at a residue corresponding to position 56 in SEQ ID NO: 13; the amino acid D at a residue corresponding to position 57 in SEQ ID NO: 13; the amino acid Q at a residue corresponding to position 58 in SEQ ID NO: 13, the amino acid R or Q at a residue corresponding to position 69 in SEQ ID NO: 13; the amino acid G at a residue corresponding to position 79 in SEQ ID NO: 13; the amino acid N, D, E, Q, or R at a residue corresponding to position 89 in SEQ ID NO. 13; the amino acid C at a residue corresponding to position 90 in SEQ ID NO: 13; the amino acid A at a residue corresponding to position 95 in SEQ ID NO: 13; the amino acid A at a residue corresponding to position 100 in SEQ ID NO: 13; the amino acid H at a residue corresponding to position 103 in SEQ ID NO: 13; the amino acid E at a residue corresponding to position 106 in SEQ ID NO: 13, the amino acid A or G at a residue corresponding to position 116 in SEQ ID NO: 13; the amino acid N or M at a residue corresponding to position 124 in SEQ ID NO: 13; the amino acid E at a residue corresponding to position 143 in SEQ ID NO: 13; the amino acid Q at a residue corresponding to position 150 in SEQ ID NO: 13; the amino acid I at a residue corresponding to position 162 in SEQ ID NO: 13; the amino acid S at a residue corresponding to position 166 in SEQ ID NO: 13; the amino acid K at a residue corresponding to position 167 in SEQ ID NO: 13; the amino acid T at a residue corresponding to position 168 in SEQ ID NO: 13; the amino acid F at a residue corresponding to position 171 in SEQ ID NO: 13; the amino acid P at a residue corresponding to position 172 in SEQ ID NO: 13; the amino acid F at a residue corresponding to position 175 in SEQ ID NO: 13; the amino acid G at a residue corresponding to position 180 in SEQ ID NO: 13; the amino acid F at a residue corresponding to position 184 in SEQ ID NO: 13; the amino acid K at a residue corresponding to position 196 in SEQ ID NO: 13; the amino acid D at a residue corresponding to position 211 in SEQ ID NO: 13; the amino acid N at a residue corresponding to position 213 in SEQ ID NO: 13, the amino acid L at a residue corresponding to position 216 in SEQ ID NO: 13; the amino acid I at a residue corresponding to position 230 in SEQ ID NO: 13; the amino acid R at a residue corresponding to position 250 in SEQ ID NO: 13; the amino acid L at a residue corresponding to position 263 in SEQ ID NO: 13; the amino acid H at a residue corresponding to position 273 in SEQ ID NO: 13; the amino acid P at a residue corresponding to position 283 in SEQ ID NO: 13; the amino acid T at a residue corresponding to position 287 in SEQ ID NO: 13; the amino acid M or A at a residue corresponding to position 290 in SEQ ID NO: 13; the amino acid M at a residue corresponding to position 292 in SEQ ID NO: 13; the amino acid D or N at a residue corresponding to position 319 in SEQ ID NO: 13; the amino acid E at a residue corresponding to position 322 in SEQ ID NO: 13; the amino acid E at a residue corresponding to position 339 in SEQ ID NO: 13; the amino acid E at a residue corresponding to position 343 in SEQ ID NO: 13; the amino acid M at a residue corresponding to position 344 in SEQ ID NO: 13; the amino acid M at a residue corresponding to position 353 in SEQ ID NO: 13, the amino acid L, Y, A, G, N, P, R, S, T, or V at a residue corresponding to position 376 in SEQ ID NO: 13; the amino acid F, P, or R at a residue corresponding to position 377 in SEQ ID NO: 13; the amino acid K, R, S, or T at a residue corresponding to position 378 in SEQ ID NO: 13; the amino acid Y at a residue corresponding to position 380 in SEQ ID NO: 13; the amino acid F at a residue corresponding to position 386 in SEQ ID NO: 13; the amino acid E at a residue corresponding to position 394 in SEQ ID NO: 13; the amino acid E or K at a residue corresponding to position 397 in SEQ ID NO: 13; the amino acid E at a residue corresponding to position 407 in SEQ ID NO: 13; the amino acid T or V at a residue corresponding to position 410 in SEQ ID NO: 13; the amino acid I, L, M, T, or V at a residue corresponding to position 414 in SEQ ID NO: 13; the amino acid M at a residue corresponding to position 415 in SEQ ID NO: 13; the amino acid F, I, or M at a residue corresponding to position 416 in SEQ ID NO: 13; the amino acid F at a residue corresponding to position 418 in SEQ ID NO: 13; the amino acid S or T at a residue corresponding to position 441 in SEQ ID NO: 13; the amino acid I at a residue corresponding to position 442 in SEQ ID NO: 13; the amino acid V or A at a residue corresponding to position 445 in SEQ ID NO: 13; the amino acid T or V at a residue corresponding to position 446 in SEQ ID NO: 13; the amino acid S at a residue corresponding to position 450 in SEQ ID NO: 13; the amino acid T at a residue corresponding to position 452 in SEQ ID NO: 13; the amino acid A at a residue corresponding to position 454 in SEQ ID NO: 13; the amino acid Y at a residue corresponding to position 467 in SEQ ID NO: 13; the amino acid S or T at a residue corresponding to position 479 in SEQ ID NO: 13; the amino acid I, M, V, or Y at a residue corresponding to position 481 in SEQ ID NO: 13; the amino acid V at a residue corresponding to position 486 in SEQ ID NO: 13; the amino acid T at a residue corresponding to position 490 in SEQ ID NO: 13; the amino acid N at a residue corresponding to position 492 in SEQ ID NO: 13; the amino acid Q at a residue corresponding to position 504 in SEQ ID NO: 13; the amino acid N at a residue corresponding to position 512 in SEQ ID NO: 13; the amino acid D at a residue corresponding to position 527 in SEQ ID NO: 13; and/or the amino acid M at a residue corresponding to position 542 in SEQ ID NO: 13.

[0025] In some embodiments, the TS comprises: the amino acid G at a residue corresponding to position 79 in SEQ ID NO: 13; the amino acid C at a residue corresponding to position 90 in SEQ ID NO: 13; the amino acid E at a residue corresponding to position 106 in SEQ ID NO: 13; the amino acid Q at a residue corresponding to position 150 in SEQ ID NO: 13; the amino acid S at a residue corresponding to position 166 in SEQ ID NO: 13; the amino acid D at a residue corresponding to position 211 in SEQ ID NO: 13; the amino acid N at a residue corresponding to position 213 in SEQ ID NO: 13; the amino acid L at a residue corresponding to position 216 in SEQ ID NO: 13; the amino acid I at a residue corresponding to position 230 in SEQ ID NO: 13; the amino acid L at a residue corresponding to position 263 in SEQ ID NO: 13; the amino acid H at a residue corresponding to position 273 in SEQ ID NO: 13; the amino acid P at a residue corresponding to position 283 in SEQ ID NO: 13; the amino acid T at a residue corresponding to position 287 in SEQ ID NO: 13; the amino acid M or A at a residue corresponding to position 290 in SEQ ID NO: 13; the amino acid M at a residue corresponding to position 292 in SEQ ID NO: 13, the amino acid D or N at a residue corresponding to position 319 in SEQ ID NO: 13; the amino acid E at a residue corresponding to position 322 in SEQ ID NO: 13; the amino acid E at a residue corresponding to position 339 in SEQ ID NO: 13; the amino acid E at a residue corresponding to position 343 in SEQ ID NO: 13; the amino acid M at a residue corresponding to position 344 in SEQ ID NO: 13; the amino acid M at a residue corresponding to position 353 in SEQ ID NO: 13; the amino acid Y at a residue corresponding to position 380 in SEQ ID NO: 13; the amino acid F at a residue corresponding to position 386 in SEQ ID NO: 13; the amino acid E at a residue corresponding to position 394 in SEQ ID NO: 13; the amino acid E or K at a residue corresponding to position 397 in SEQ ID NO: 13; the amino acid E at a residue corresponding to position 407 in SEQ ID NO: 13; the amino acid F, I, or M at a residue corresponding to position 416 in SEQ ID NO: 13; the amino acid F at a residue corresponding to position 418 in SEQ ID NO: 13; the amino acid S or T at a residue corresponding to position 441 in SEQ ID NO: 13; the amino acid I at a residue corresponding to position 442 in SEQ ID NO: 13; the amino acid T or V at a residue corresponding to position 446 in SEQ ID NO: 13; the amino acid S at a residue corresponding to position 450 in SEQ ID NO: 13; the amino acid S or T at a residue corresponding to position 479 in SEQ ID NO: 13; the amino acid I, M, V, or Y at a residue corresponding to position 481 in SEQ ID NO: 13; the amino acid V at a residue corresponding to position 486 in SEQ ID NO: 13; the amino acid T at a residue corresponding to position 490 in SEQ ID NO: 13; the amino acid Q at a residue corresponding to position 504 in SEQ ID NO: 13; and/or the amino acid N at a residue corresponding to position 512 in SEQ ID NO: 13.

[0026] In some embodiments, the TS comprises at least 2, 3, 4, 5, 6, 7, 8, 9, 10, 11, 12, 13, 14, 15, or 16 amino acid substitutions at residues corresponding to positions 31, 47, 49, 50, 56, 57, 58, 69, 79, 89, 90, 95, 100, 103, 106, 116, 124, 143, 150, 162, 166, 167, 168, 171, 172, 175, 180, 184, 196, 211, 213, 216, 230, 250, 263, 273, 283, 287, 290, 292, 319, 322, 339, 343, 344, 353, 376, 377, 378, 380, 386, 394, 397, 407, 410, 414, 415, 416,418, 441, 442, 445,446, 479, 450, 452, 454, 467, 481, 486, 490, 492, 504, 512, 527 and/or 542 in SEQ ID NO: 13. In some embodiments, the TS comprises at least 2, 3, 4, 5, 6, 7, 8, 9, 10, 11, 12, 13, 14, 15, or 16 amino acid substitutions at residues corresponding to positions 79, 90, 106, 150, 166, 184, 211, 216, 230, 263, 273, 283, 290, 292, 319, 322, 339, 353, 380, 386, 397, 407, 416,418, 441, 442, 446, 479, 450, 452, 454, 467, 481, 486, 504, and/or 512 in SEQ ID NO: 13.

[0027] In some embodiments, the TS comprises relative to SEQ ID NO: 13: K50N, G95A, N196K, H213N, T339E, Q343E, L344M, and A414V; G95A, Y175F, T339E, Q343E, and A414V; G95A, S116A, T339E, Q343E, A414V, and N527D; G95A, E150Q, V162L, C180G, N196K, N211D, N273H, T339E, Q343E, and A414V; G95A, T339E, Q343E, Q376V, and A414V; K50N, G95A, S100A, E150Q, V162I, C180G, N196K, N211 D, H213N, S322E, T339E, Q343E, L344M, A414V, E452T, and I504Q; G95A, N196K, T339E, Q343E, and A414V; 50N, G95A, V103H, H213N, T339E, Q343E, L344M, and A414V; G95A, T339E, Q343E, Q376R, and A414V; or K50N, H213N, L230I, T339E, Q343E, and L344M.

[0028] In some embodiments, the TS comprises relative to SEQ ID NO: 13: K50N, H213N, L230I, T339E, Q343E, and L344M; S100A, T339E, and Q343E; T339E, Q343E, L344M, and N527D; K50N, V162I, C180G, N196K, N211D, H213N, T339E, Q343E, and L344M; K50N, E150Q, V162I, C180G, N196K, N211 D, H213N, T339E, Q343E, and L344M; S116A, H213N, T339E, Q343E, L344M, and N527D; N196K, T339E, and Q343E; K50N, E150Q, V1621, A172P, C180G, N196K, N211D, H213N, T339E, Q343E, and L344M; V216L, T339E, and Q343E; S116A, H213N, T339E, Q343E, and N527D; S116A, T339E, Q343E, and N527D; or T339E, Q343E, and Q376P.

[0029] In some embodiments, the TS comprises a sequence that is at least 90%, at least 95%, at least 96%, at least 97%, at least 98%, or at least 99% identical to any one of SEQ ID NOs: 143, 149, 151-153, 156, 160, 163, 165, 166, 168, 170-172, 175-180, 182-197, 201, 204, 205, 207-225, 464-473, 478-480, 484-485, 487-489, 492-498, 500, 503, 506-548, 550, 551-552, 556, 558, 565, 567, 569-570, 572-578, 582, 584, 586, 588, 591, 593-595, 597, 600, 602, 604, 605, 718, 755, 784, 786, 790-792, 794, 795, 798, 800, 801, 803, 804, 806-810, 812-821, 823, 825, 827-836, 838, 839, 841-868, 870-874, 875-879, 881, 883, 913-932, 939-941, 944, 945, 946, and 948, or a conservatively substituted version thereof. In some embodiments, the TS comprises a sequence that is at least 90%, at least 95%, at least 96%, at least 97%, at least 98%, or at least 99% identical to any one of SEQ ID NOs: 784, 786, 792, 804, 828, 801, 806, 830, 808, 813, 809, 800, 815, 816 836, 825, 791, 845, 823, and 820, or a conservatively substituted version thereof. In some embodiments, the TS comprises a sequence that is at least 90%, at least 95%, at least 96%, at least 97%, at least 98%, or at least 99% identical to any one of SEQ ID NOs: 795, 812, 816, 817, 823, 825, 853, 868, 874, 946, 948, and 949, or a conservatively substituted version thereof. In some embodiments, the TS comprises the sequence of any one of SEQ ID NOs: 143, 149, 151-153, 156, 160, 163, 165, 166, 168, 170-172, 175-180, 182-197, 201, 204, 205, 207-225, 464-473, 478-480, 484-485, 487-489, 492-498, 500, 503, 506-548, 550, 551-552, 556, 558, 565, 567, 569-570, 572-578, 582, 584, 586, 588, 591, 593-595, 597, 600, 602, 604, 605, 718, 755, 784, 786, 790-792, 794, 795, 798, 800, 801, 803, 804, 806-810, 812-821, 823, 825, 827-836, 838, 839, 841-868, 870-874, 875-879, 881, 883, 913-932, 939-941, 944, 945, 946, and 948, or a conservatively substituted version thereof.

[0030] Further aspects of the disclosure relate to host cells that comprise a heterologous polynucleotide encoding a TS, wherein the TS comprises a sequence that is at least 98% identical to SEQ ID NO: 36, and wherein the host cell is capable of producing a CBD-type cannabinoid. In some embodiments, the CBD-type cannabinoid is CBDA and/or CBDVA. In some embodiments, the TS is capable of producing more of a CBD-type cannabinoid than a control TS, wherein the control TS comprises the sequence of SEQ ID NO: 136. In some embodiments, the TS is capable of producing at least 0.05%, 0.075%, 0.1%, 0.5%, 0.75%, 1%, 5%, 10%, 20%, 30%, 40%, 50%, 60%, 70%, 80%, 90%, 120%, 150%, 170%, 200%, 240%, 290%, or 300% more of a CBD-type cannabinoid than a control TS, wherein the control TS comprises the sequence of SEQ ID NO: 136.

[0031] In some embodiments, the TS further comprises a first signal peptide. In some embodiments, the first signal peptide comprises SEQ ID NO: 16 or a sequence that has no more than two amino acid substitutions, insertions, additions, or deletions relative to the sequence of SEQ ID NO: 16. In some embodiments, the first signal peptide is located at the amino terminus of the TS. In some embodiments, a methionine residue is added to the N-terminus of SEQ ID NO: 16. In some embodiments, the TS further comprises a second signal peptide. In some embodiments, the second signal peptide comprises SEQ ID NO: 17 or a sequence that has no more than one amino acid substitution, insertion, addition, or deletion relative to the sequence of SEQ ID NO: 17. In some embodiments, the second signal peptide is located at the carboxyl terminus of the TS.

[0032] In some embodiments, the host cell further produces one or more of THCA, THCVA, CBCA and/or CBCVA. In some embodiments, the TS produces a higher ratio of CBDA:THCA, CBDA:CBCA, CBDVA:THCVA and/or CBCVA:THCVA than a control TS. In some embodiments, the control TS is a TS comprising the sequence of SEQ ID NO: 136. In some embodiments, the TS has a higher product specificity for a CBD-type cannabinoid than a control TS. In some embodiments, the control TS is a TS comprising the sequence of SEQ ID NO: 136.

[0033] Further aspects of the disclosure relate to host cells that comprise a heterologous polynucleotide encoding a TS, wherein relative to the sequence of SEQ ID NO: 14, the TS comprises an amino acid substitution at one or more residues corresponding to positions 41, 47, 49, 51, 52, 56, 58, 61, 63, 95, 96, 103, 116, 129, 136, 143, 158, 173, 181, 237, 242, 247, 257, 268, 273, 296, 302, 309, 311, 340, 344, 345, 351, 354, 360, 361, 363, 377, 378, 379, 382, 396, 411, 424, 425, 430, 442, 443, 446, 447, 459, 462, 464, 465, 469, 475, 479, 489, 491, 492, 493, 494, 496, 516, 524, 528, 542, 543, and/or 544 in SEQ ID NO: 14, and wherein the TS is capable of producing a CBC-type cannabinoid.

[0034] In some embodiments, relative to the sequence of SEQ ID NO: 14, the TS further comprises an amino acid substitution at one or more residues corresponding to positions 31, 40, 46, 74, 90, 255, 288, 290, 318, and/or 495 in SEQ ID NO: 14. In some embodiments, the TS is capable of producing more of a CBC-type cannabinoid than a control TS, and wherein the control TS comprises the sequence of SEQ ID NO: 21. In some embodiments, a control TS, or a polynucleotide encoding a control TS, comprises the sequence of any one of SEQ ID NOs: 20, 21, 22, 23, or 24.

[0035] Further aspects of the disclosure relate to host cells that comprise a heterologous polynucleotide encoding a TS, wherein relative to the sequence of SEQ ID NO: 14, the TS comprises an amino acid substitution at one or more residues corresponding to positions 31, 40, 41, 46, 47, 49, 51, 52, 56, 58, 61, 63, 74, 90, 95, 96, 103, 116, 129, 136, 143, 158, 173, 181, 237, 242, 247, 255, 257, 268, 273, 288, 290, 296, 302, 309, 311, 318, 340, 344, 345, 351, 354, 360, 361, 363, 377, 378, 379, 382, 396, 411, 424, 425, 430, 442, 443, 446, 447, 459, 462, 464, 465, 469, 475, 479, 489, 491, 492, 493, 494, 495, 496, 516, 524, 528, 542, 543, and/or 544 in SEQ ID NO: 14, wherein the TS is capable of producing more of a CBC-type cannabinoid than a control TS, and wherein the control TS comprises the sequence of SEQ ID NO: 21. In some embodiments, a control TS, or a polynucleotide encoding a control TS, comprises the sequence of any one of SEQ ID NOs: 20, 21, 22, 23, or 24.

[0036] In some embodiments, the CBC-type cannabinoid is CBCA and/or CBCVA. In some embodiments, the TS is capable of producing at least 0.05%, 0.075%, 0.1%, 0.5%, 0.75%, 1%, 5%, 10%, 20%, 30%, 40%, 50%, 60%, 70%, 80%, 90%, 120%, 150%, 170%, 200%, 240%, 290%, or 300% more of a CBC-type cannabinoid than a control TS, wherein the control TS comprises the sequence of SEQ ID NO: 21. In some embodiments, the TS is capable of producing at least 1, 2, 3, or 4-fold more of a CBC-type cannabinoid than a control TS, wherein the control TS comprises the sequence of SEQ ID NO: 21. In some embodiments, a control TS, or a polynucleotide encoding a control TS, comprises the sequence of any one of SEQ ID NOs: 20, 21, 22, 23, or 24.

[0037] In some embodiments, the TS comprises: the amino acid Q at a residue corresponding to position 31 in SEQ ID NO: 14; the amino acid E at a residue corresponding to position 40 in SEQ ID NO: 14; the amino acid Y at a residue corresponding to position 41 in SEQ ID NO: 14; the amino acid P at a residue corresponding to position 46 in SEQ ID NO: 14; the amino acid T at a residue corresponding to position 47 in SEQ ID NO: 14; the amino acid A at a residue corresponding to position 49 in SEQ ID NO: 14; the amino acid F at a residue corresponding to position 51 in SEQ ID NO: 14; the amino acid I at a residue corresponding to position 52 in SEQ ID NO: 14; the amino acid N at a residue corresponding to position 56 in SEQ ID NO: 14; the amino acid S at a residue corresponding to position 58 in SEQ ID NO: 14; the amino acid S at a residue corresponding to position 61 in SEQ ID NO: 14; the amino acid V or L at a residue corresponding to position 63 in SEQ ID NO: 14; the amino acid T at a residue corresponding to position 74 in SEQ ID NO: 14; the amino acid V at a residue corresponding to position 90 in SEQ ID NO: 14; the amino acid G at a residue corresponding to position 95 in SEQ ID NO: 14; the amino acid S at a residue corresponding to position 96 in SEQ ID NO: 14; the amino acid I at a residue corresponding to position 103 in SEQ ID NO: 14; the amino acid S at a residue corresponding to position 116 in SEQ ID NO: 14; the amino acid I at a residue corresponding to position 129 in SEQ ID NO: 14; the amino acid R at a residue corresponding to position 136 in SEQ ID NO: 14; the amino acid E at a residue corresponding to position 143 in SEQ ID NO: 14; the amino acid L at a residue corresponding to position 158 in SEQ ID NO: 14; the amino acid A at a residue corresponding to position 173 in SEQ ID NO: 14; the amino acid A at a residue corresponding to position 181 in SEQ ID NO: 14; the amino acid S at a residue corresponding to position 237 in SEQ ID NO: 14; the amino acid V at a residue corresponding to position 242 in SEQ ID NO: 14; the amino acid R at a residue corresponding to position 247 in SEQ ID NO: 14; the amino acid V at a residue corresponding to position 255 in SEQ ID NO: 14; the amino acid M at a residue corresponding to position 257 in SEQ ID NO: 14; the amino acid E at a residue corresponding to position 268 in SEQ ID NO: 14; the amino acid V at a residue corresponding to position 273 in SEQ ID NO: 14; the amino acid L at a residue corresponding to position 288 in SEQ ID NO: 14; the amino acid F at a residue corresponding to position 290 in SEQ ID NO: 14; the amino acid R at a residue corresponding to position 296 in SEQ ID NO: 14; the amino acid Q at a residue corresponding to position 302 in SEQ ID NO: 14; the amino acid I at a residue corresponding to position 309 in SEQ ID NO: 14; the amino acid S at a residue corresponding to position 311 in SEQ ID NO: 14; the amino acid L at a residue corresponding to position 318 in SEQ ID NO: 14; the amino acid E at a residue corresponding to position 340 in SEQ ID NO: 14; the amino acid Q at a residue corresponding to position 344 in SEQ ID NO: 14; the amino acid L at a residue corresponding to position 345 in SEQ ID NO: 14; the amino acid I at a residue corresponding to position 351 in SEQ ID NO: 14; the amino acid F at a residue corresponding to position 354 in SEQ ID NO: 14; the amino acid Y at a residue corresponding to position 360 in SEQ ID NO: 14; the amino acid D at a residue corresponding to position 361 in SEQ ID NO: 14; the amino acid T at a residue corresponding to position 363 in SEQ ID NO: 14; the amino acid Q at a residue corresponding to position 377 in SEQ ID NO: 14; the amino acid N at a residue corresponding to position 378 in SEQ ID NO: 14; the amino acid A at a residue corresponding to position 379 in SEQ ID NO: 14; the amino acid S at a residue corresponding to position 382 in SEQ ID NO: 14; the amino acid V at a residue corresponding to position 396 in SEQ ID NO: 14; the amino acid V at a residue corresponding to position 411 in SEQ ID NO: 14; the amino acid D at a residue corresponding to position 424 in SEQ ID NO: 14; the amino acid K at a residue corresponding to position 425 in SEQ ID NO: 14; the amino acid T at a residue corresponding to position 430 in SEQ ID NO: 14; the amino acid I at a residue corresponding to position 442 in SEQ ID NO: 14; the amino acid I or V at a residue corresponding to position 443 in SEQ ID NO: 14; the amino acid I at a residue corresponding to position 446 in SEQ ID NO: 14; the amino acid C at a residue corresponding to position 447 in SEQ ID NO: 14; the amino acid L at a residue corresponding to position 459 in SEQ ID NO: 14; the amino acid I at a residue corresponding to position 462 in SEQ ID NO: 14; the amino acid N at a residue corresponding to position 464 in SEQ ID NO: 14; the amino acid I at a residue corresponding to position 465 in SEQ ID NO: 14: the amino acid M at a residue corresponding to position 469 in SEQ ID NO: 14; the amino acid K at a residue corresponding to position 475 in SEQ ID NO: 14; the amino acid M at a residue corresponding to position 479 in SEQ ID NO: 14; the amino acid I at a residue corresponding to position 489 in SEQ ID NO: 14; the amino acid I at a residue corresponding to position 491 in SEQ ID NO: 14; the amino acid N at a residue corresponding to position 492 in SEQ ID NO: 14; the amino acid D at a residue corresponding to position 493 in SEQ ID NO: 14; the amino acid F or P at a residue corresponding to position 494 in SEQ ID NO: 14; the amino acid E or K at a residue corresponding to position 495 in SEQ ID NO: 14; the amino acid N at a residue corresponding to position 496 in SEQ ID NO: 14; the amino acid D at a residue corresponding to position 516 in SEQ ID NO: 14; the amino acid L at a residue corresponding to position 524 in SEQ ID NO: 14; the amino acid D at a residue corresponding to position 528 in SEQ ID NO: 14; the amino acid L or R at a residue corresponding to position 542 in SEQ ID NO: 14; the amino acid R at a residue corresponding to position 543 in SEQ ID NO: 14; and/or the amino acid R at a residue corresponding to position 544 in SEQ ID NO: 14.

[0038] In some embodiments, the TS comprises: the amino acid Y at a residue corresponding to position 41 in SEQ ID NO: 14; the amino acid T at a residue corresponding to position 47 in SEQ ID NO: 14; the amino acid A at a residue corresponding to position 49 in SEQ ID NO: 14; the amino acid F at a residue corresponding to position 51 in SEQ ID NO: 14; the amino acid I at a residue corresponding to position 52 in SEQ ID NO: 14; the amino acid N at a residue corresponding to position 56 in SEQ ID NO: 14; the amino acid S at a residue corresponding to position 58 in SEQ ID NO: 14; the amino acid S at a residue corresponding to position 61 in SEQ ID NO: 14; the amino acid V or L at a residue corresponding to position 63 in SEQ ID NO: 14; the amino acid G at a residue corresponding to position 95 in SEQ ID NO: 14; the amino acid S at a residue corresponding to position 96 in SEQ ID NO: 14; the amino acid I at a residue corresponding to position 103 in SEQ ID NO: 14; the amino acid S at a residue corresponding to position 116 in SEQ ID NO: 14; the amino acid I at a residue corresponding to position 129 in SEQ ID NO: 14; the amino acid R at a residue corresponding to position 136 in SEQ ID NO: 14; the amino acid E at a residue corresponding to position 143 in SEQ ID NO: 14; the amino acid L at a residue corresponding to position 158 in SEQ ID NO: 14; the amino acid A at a residue corresponding to position 173 in SEQ ID NO: 14; the amino acid A at a residue corresponding to position 181 in SEQ ID NO: 14; the amino acid S at a residue corresponding to position 237 in SEQ ID NO: 14; the amino acid V at a residue corresponding to position 242 in SEQ ID NO: 14; the amino acid R at a residue corresponding to position 247 in SEQ ID NO: 14; the amino acid M at a residue corresponding to position 257 in SEQ ID NO: 14; the amino acid E at a residue corresponding to position 268 in SEQ ID NO: 14; the amino acid V at a residue corresponding to position 273 in SEQ ID NO: 14; the amino acid R at a residue corresponding to position 296 in SEQ ID NO: 14; the amino acid Q at a residue corresponding to position 302 in SEQ ID NO: 14; the amino acid I at a residue corresponding to position 309 in SEQ ID NO: 14; the amino acid S at a residue corresponding to position 311 in SEQ ID NO: 14; the amino acid E at a residue corresponding to position 340 in SEQ ID NO: 14; the amino acid Q at a residue corresponding to position 344 in SEQ ID NO: 14; the amino acid L at a residue corresponding to position 345 in SEQ ID NO: 14; the amino acid I at a residue corresponding to position 351 in SEQ ID NO: 14; the amino acid F at a residue corresponding to position 354 in SEQ ID NO: 14; the amino acid Y at a residue corresponding to position 360 in SEQ ID NO: 14; the amino acid D at a residue corresponding to position 361 in SEQ ID NO: 14; the amino acid T at a residue corresponding to position 363 in SEQ ID NO: 14; the amino acid Q at a residue corresponding to position 377 in SEQ ID NO: 14; the amino acid N at a residue corresponding to position 378 in SEQ ID NO: 14; the amino acid A at a residue corresponding to position 379 in SEQ ID NO: 14; the amino acid S at a residue corresponding to position 382 in SEQ ID NO: 14; the amino acid V at a residue corresponding to position 396 in SEQ ID NO: 14; the amino acid V at a residue corresponding to position 411 in SEQ ID NO: 14; the amino acid D at a residue corresponding to position 424 in SEQ ID NO: 14; the amino acid K at a residue corresponding to position 425 in SEQ ID NO: 14; the amino acid T at a residue corresponding to position 430 in SEQ ID NO: 14; the amino acid I at a residue corresponding to position 442 in SEQ ID NO: 14; the amino acid I or V at a residue corresponding to position 443 in SEQ ID NO: 14; the amino acid I at a residue corresponding to position 446 in SEQ ID NO: 14; the amino acid C at a residue corresponding to position 447 in SEQ ID NO: 14; the amino acid L at a residue corresponding to position 459 in SEQ ID NO: 14; the amino acid I at a residue corresponding to position 462 in SEQ ID NO: 14; the amino acid N at a residue corresponding to position 464 in SEQ ID NO: 14; the amino acid I at a residue corresponding to position 465 in SEQ ID NO: 14; the amino acid M at a residue corresponding to position 469 in SEQ ID NO: 14; the amino acid K at a residue corresponding to position 475 in SEQ ID NO: 14; the amino acid M at a residue corresponding to position 479 in SEQ ID NO: 14; the amino acid I at a residue corresponding to position 489 in SEQ ID NO: 14, the amino acid I at a residue corresponding to position 491 in SEQ ID NO: 14; the amino acid N at a residue corresponding to position 492 in SEQ ID NO: 14; the amino acid D at a residue corresponding to position 493 in SEQ ID NO: 14; the amino acid F or P at a residue corresponding to position 494 in SEQ ID NO: 14; the amino acid N at a residue corresponding to position 496 in SEQ ID NO: 14; the amino acid D at a residue corresponding to position 516 in SEQ ID NO: 14; the amino acid L at a residue corresponding to position 524 in SEQ ID NO: 14; the amino acid D at a residue corresponding to position 528 in SEQ ID NO: 14; the amino acid L or R at a residue corresponding to position 542 in SEQ ID NO: 14; the amino acid R at a residue corresponding to position 543 in SEQ ID NO: 14; and/or the amino acid R at a residue corresponding to position 544 in SEQ ID NO: 14.

[0039] In some embodiments, the TS comprises at least 2, 3, 4, 5, 6, 7, 8, 9, 10, 11, 12, 13, 14, 15, or 16 amino acid substitutions at residues corresponding to positions 31, 40, 41, 46, 47, 49, 51, 52, 56, 58, 61, 63, 74, 90, 95, 96, 103, 116, 129, 136, 143, 158, 173, 181, 237, 242, 247, 255, 257, 268, 273, 288, 290, 296, 302, 309, 311, 318, 340, 344, 345, 351, 354, 360, 361, 363, 377, 378, 379, 382, 396, 411, 424, 425, 430, 442, 443, 446, 447, 459, 462, 464, 465, 469, 475, 479, 489, 491, 492, 493, 494, 495, 496, 516, 524, 528, 542, 543, and/or 544 in SEQ ID NO: 14. In some embodiments, the TS comprises at least 2, 3, 4, 5, 6, 7, 8, 9, 10, 11, 12, 13, 14, 15, or 16 amino acid substitutions at residues corresponding to positions 41, 47, 49, 51, 52, 56, 58, 61, 63, 95, 96, 103, 116, 129, 136, 143, 158, 173, 181, 237, 242, 247, 257, 268, 273, 296, 302, 309, 311, 340, 344, 345, 351, 354, 360, 361, 363, 377, 378, 379, 382, 396, 411, 424, 425, 430, 442, 443, 446, 447, 459, 462, 464, 465, 469, 475, 479, 489, 491, 492, 493, 494, 496, 516, 524, 528, 542, 543, and/or 544 in SEQ ID NO: 14.

[0040] In some embodiments, the TS comprises relative to SEQ ID NO: 14: Q58S, V288L, and F345L; R31Q, V52I, H56N, Q58S, M61S, I74T, N90V, A250P, S255V, F345L, Q475K, and T492N; R31Q, H56N, 174T, N90V, H143E, A250P, S255V, Q475K, and T492N; R31Q, H56N, I74T, N90V, A250P, S255V, L443I, Q475K, and T492N; H56N, M61S, N90V, A250D, S255V, V288L, Q475K, T492N, and A495E; R31Q, H56N, 174T, N90V, K215R, A250P, S255V, Q475K, and T492N; R31Q, P49A, H56N, Q58S, M61S, I74T, N90V, H143E, A250P, S255V, V288L, F345L, Q475K, and T492N; R31Q, A47T, H56N, I74T, N90V, A250P, S255V, Q475K, and T492N; M61S, N90V, A250D, S255V, Q475K, T492N, A495E, and N498T; R31Q, H56N, M61S, I74T, N89H, N90V, S100A, H136R, E150Q, N196K, N211D, A250P, S255V, V288M, F345M, S382K, L443I, Q475K, and T492N; R31Q, H56N, Q58S, M61S, I74T, N90V, H143E, A250P, S255V, V288L, T340E, F345L, E424D, Q475K, and T492N; R31Q, H56N, I74T, S88L, N90V, A250P, S255V, Q475K, and T492N; R31Q, V52I, H56N, Q58S, M61S, 174T, N90V, H143E, A250P, S255V, V288L, F345L, Q475K, and T492N; R31Q, H56N, Q58S, M61S, 174T, N90V, H143E, A250P, S255V, V288L, T340E, F345L, E424D, Q475K, and T492N; R31Q, H56N, Q58S, M61S, I74T, N90V, H143E, A250P, S255V, V288L, F345L, A411V, Q475K, and T492N; R31Q, V52I, H56N, Q58S, M61S, I74T, N90V, A250P, S255V, V288L, F345L, Q475K, and T492N; R31Q, K50L, H56N, I74T, N90V, A250P, S255V, Q475K, and T492N; R31Q, A47T, V52I, H56N, Q58S, M61S, I74T, N90V, H143E, A250P, S255V, V288L, T340E, F345L, Q475K, and T492N; or R31Q, H56N, M61S, I74T, N89H, N90V, S100A, N196K, N211D, A250P, S255V, I257R, V288M, F345M, S382K, L443I, Q475K, and T492N.

[0041] In some embodiments, the TS comprises a sequence that is at least 90%, at least 95%, at least 97%, at least 98%, or at least 99% identical to any one of SEQ ID NOs: 137-140, 142-143, 145-150, 154, 157, 159, 161, 162, 164, 167, 169, 173, 174, 177-193, 195, 196, 199, 204-206, 464-466, 488, 489, 492-498, 500, 502, 503, 506, 507-548, 550, 551, 552, 565, 574, 595, 597, 602, 698-882, and 993, or a conservatively substituted version thereof. In some embodiments, the TS comprises a sequence that is at least 90%, at least 95%, at least 97%, at least 98%, or at least 99% identical to any one of SEQ ID NOs: 698-716, or a conservatively substituted version thereof. In some embodiments, the TS comprises the sequence of any one of SEQ ID NOs: 137-140, 142-143, 145-150, 154, 157, 159, 161, 162, 164, 167, 169, 173, 174, 177-193, 195, 196, 199, 204-206, 464-466, 488, 489, 492-498, 500, 502, 503, 506, 507-548, 550, 551, 552, 565, 574, 595, 597, 602, 698-882, and 993, or a conservatively substituted version thereof.

[0042] Further aspects of the disclosure relate to host cells that comprise a heterologous polynucleotide encoding a TS, wherein the TS comprises a sequence that is at least 98% identical to SEQ ID NO: 39, and wherein the host cell is capable of producing a CBC-type cannabinoid. In some embodiments, the CBC-type cannabinoid is CBCA and/or CBCVA. In some embodiments, the TS is capable of producing more of a CBC-type cannabinoid than a control TS, wherein the control TS comprises the sequence of SEQ ID NO: 21. In some embodiments, a control TS, or a polynucleotide encoding a control TS, comprises the sequence of any one of SEQ ID NOs: 20, 21, 22, 23, or 24. In some embodiments, the TS is capable of producing at least 0.05%, 0.075%, 0.1%, 0.5%, 0.75%, 1%, 5%, 10%, 20%, 30%, 40%, 50%4, 60%, 70%, 80%, 90%, 120%, 150%, 170%, 200%, 240%, 290%, or 300% more of a CBC-type cannabinoid than a control TS, wherein the control TS comprises the sequence SEQ ID NO: 21. In some embodiments, a control TS, or a polynucleotide encoding a control TS, comprises the sequence of any one of SEQ ID NOs: 20, 21, 22, 23, or 24.

[0043] In some embodiments, the TS further comprises a first signal peptide. In some embodiments, the first signal peptide comprises SEQ ID NO: 16 or a sequence that has no more than two amino acid substitutions, insertions, additions, or deletions relative to the sequence of SEQ ID NO: 16. In some embodiments, the first signal peptide is located at the amino terminus of the TS. In some embodiments, a methionine residue is added to the N-terminus of SEQ ID NO: 16. In some embodiments, the TS further comprises a second signal peptide. In some embodiments, the second signal peptide comprises SEQ ID NO: 17 or a sequence that has no more than one amino acid substitution, insertion, addition, or deletion relative to the sequence of SEQ ID NO: 17. In some embodiments, the second signal peptide is located at the carboxyl terminus of the TS.

[0044] In some embodiments, the host cell further produces one or more of THCA, THCVA, CBDA and/or CBDVA. In some embodiments, the TS produces a higher ratio of CBCA:THCA, CBCA:CBDA, CBCVA:THCVA, and/or CBCVA: CBDVA than a control TS. In some embodiments, the control TS is a TS comprising the sequence of SEQ ID NO: 21. In some embodiments, the TS has a higher product specificity for a THC-type cannabinoid than a control TS. In some embodiments, the control TS is a TS comprising the sequence of SEQ ID NO: 21. In some embodiments, a control TS, or a polynucleotide encoding a control TS, comprises the sequence of any one of SEQ ID NOs: 20, 21, 22, 23, or 24.

[0045] In some embodiments, the host cell is a plant cell, an algal cell, a yeast cell, a bacterial cell, or an animal cell. In some embodiments, the host cell is a yeast cell. In some embodiments, the yeast cell is a Saccharomyces cell, a Yarrowia cell, a Komagataella cell, or a Pichia cell. In some embodiments, the Saccharomyces cell is a Saccharomyces cerevisiae cell. In some embodiments, the yeast cell is a Yarrowia cell. In some embodiments, the host cell is a bacterial cell. In some embodiments, the bacterial cell is an E. coli cell. In some embodiments, the host cell further comprises one or more heterologous polynucleotides encoding one or more of: an acyl activating enzyme (AAE), a polyketide synthase (PKS), a polyketide cyclase (PKC), a prenyltransferase (PT), and/or an additional terminal synthase (TS). In some embodiments, the PKS is an olivetol synthase (OLS) or a divarinol synthase.

[0046] Further aspects of the disclosure relate to methods comprising culturing any of the host cells associated with the disclosure.

[0047] Further aspects of the disclosure relate to methods for producing a cannabinoid comprising contacting a CBG-type cannabinoid with a TS, wherein relative to the sequence of SEQ ID NO: 14, the TS comprises an amino acid substitution at one or more residues corresponding to positions 36, 44, 47, 52, 58, 76, 85, 88, 89, 95, 129, 136, 150, 158, 181, 211, 237, 242, 247, 255, 267, 268, 273, 274, 288, 302, 309, 318, 329, 340, 344, 345, 351, 360, 361, 363, 379, 382, 396, 419, 424, 443, 459, 462, 464, 469, 479, 475, 491, 492, and/or 499 in SEQ ID NO: 14.

[0048] Further aspects of the disclosure relate to methods for producing a cannabinoid comprising contacting a CBG-type cannabinoid with a TS, wherein relative to the sequence of SEQ ID NO: 14, the TS comprises an amino acid substitution at one or more residues corresponding to positions 31, 36, 40, 41, 44, 46, 47, 49, 51, 52, 56, 58, 59, 61, 63, 74, 76, 85, 88, 89, 90, 95, 96, 100, 103, 116, 129, 136, 143, 150, 158, 173, 181, 196, 211, 237, 242, 247, 250, 255, 257, 267, 268, 273, 274, 288, 290, 296, 302, 309, 311, 318, 329, 340, 344, 345, 351, 354, 360, 361, 363, 377, 378, 379, 382, 396, 411, 417, 419, 424, 443, 446, 459, 462, 464, 469, 479, 475, 491, 492, 494, 495, 499, 528, 542, 543, and/or 544 in SEQ ID NO: 14, wherein the TS does not comprise SEQ ID NO: 20, 21, 320 or 321, wherein the TS is capable of producing more of a THC-type cannabinoid than a control TS, and wherein the control TS comprises the sequence of SEQ ID NO: 284 or SEQ ID NO: 21. In some embodiments, a control TS, or a polynucleotide encoding a control TS, comprises the sequence of any one of SEQ ID NOs: 20, 21, 22, 23, 24, 14, 284, 254, or 1220.

[0049] Further aspects of the disclosure relate to methods for producing a cannabinoid comprising contacting a CBG-type cannabinoid with a TS, wherein relative to the sequence of SEQ ID NO: 13, the TS comprises an amino acid substitution at one or more residues corresponding to positions 79, 90, 106, 150, 166, 184, 211, 216, 230, 263, 273, 283, 290, 292, 319, 322, 339, 353, 380, 386, 397, 407, 416, 418, 441, 442, 446, 479, 450, 452, 454, 467, 481, 486, 504, and/or 512 in SEQ ID NO: 13.

[0050] Further aspects of the disclosure relate to methods for producing a cannabinoid comprising contacting a CBG-type cannabinoid with a TS, wherein relative to the sequence of SEQ ID NO: 13, the TS comprises an amino acid substitution at one or more residues corresponding to positions 31, 47, 49, 50, 56, 57, 58, 69, 79, 89, 90, 95, 100, 103, 106, 116, 124, 143, 150, 162, 166, 167, 168,171, 172, 175, 180, 184, 196, 211, 213, 216, 230, 250, 263, 273, 283, 287, 290, 292, 319, 322, 339, 343, 344, 353, 376, 377, 378, 380, 386, 394, 397, 407, 410, 414, 415, 416, 418, 441, 442, 445, 446, 479, 450, 452, 454, 467, 481, 486, 490, 492, 504, 512, 527 and/or 542 in SEQ ID NO: 13, wherein the TS is capable of producing more of a CBD-type cannabinoid than a control TS, and wherein the control TS comprises the sequence of SEQ ID NO: 136.

[0051] Further aspects of the disclosure relate to methods for producing a cannabinoid comprising contacting a CBG-type cannabinoid with a TS, wherein relative to the sequence of SEQ ID NO: 14, the TS comprises an amino acid substitution at one or more residues corresponding to positions 41, 47, 49, 51, 52, 56, 58, 61, 63, 95, 96, 103, 116, 129, 136, 143, 158, 173, 181, 237, 242, 247, 257, 268, 273, 296, 302, 309, 311, 340, 344, 345, 351, 354, 360, 361, 363, 377, 378, 379, 382, 396, 411, 424, 425, 430, 442, 443, 446, 447, 459, 462, 464, 465, 469, 475, 479, 489, 491, 492, 493, 494, 496, 516, 524, 528, 542, 543, and/or 544 in SEQ ID NO: 14 and wherein the TS is capable of producing a CBC-type cannabinoid.

[0052] Further aspects of the disclosure relate to methods for producing a cannabinoid comprising contacting a CBG-type cannabinoid with a TS, wherein relative to the sequence of SEQ ID NO: 14, the TS comprises an amino acid substitution at one or more residues corresponding to positions 31, 40, 41, 46, 47, 49, 51, 52, 56, 58, 61, 63, 74, 90, 95, 96, 103, 116, 129, 136, 143, 158, 173, 181, 237, 242, 247, 255, 257, 268, 273, 288, 290, 296, 302, 309, 311, 318, 340, 344, 345, 351, 354, 360, 361, 363, 377, 378, 379, 382, 396, 411, 424, 425, 430, 442, 443, 446, 447, 459, 462, 464, 465, 469, 475, 479, 489, 491, 492, 493, 494, 495, 496, 516, 524, 528, 542, 543, and/or 544 in SEQ ID NO: 14, wherein the TS is capable of producing more of a CBC-type cannabinoid than a control TS, and wherein the control TS comprises the sequence of SEQ ID NO: 21. In some embodiments, a control TS, or a polynucleotide encoding a control TS, comprises the sequence of any one of SEQ ID NOs: 20, 21, 22, 23, or 24.

[0053] In some embodiments, contacting the CBG-type cannabinoid with the TS occurs in vitro. In some embodiments, contacting the CBG-type cannabinoid with the TS occurs in vivo. In some embodiments, contacting the CBG-type cannabinoid with the TS occurs in a host cell.

[0054] Further aspects of the disclosure relate to non-naturally occurring TSs, wherein relative to the sequence of SEQ ID NO: 14, the TS comprises an amino acid substitution at one or more residues corresponding to positions 36, 44, 47, 52, 58, 76, 85, 88, 89, 95, 129, 136, 150, 158, 181, 211, 237, 242, 247, 255, 267, 268, 273, 274, 288, 302, 309, 318, 329, 340, 344, 345, 351, 360, 361, 363, 379, 382, 396, 419,424, 443, 459, 462, 464,469, 479, 475, 491, 492, and/or 499 in SEQ ID NO: 14, and wherein the TS is capable of producing a THC-type cannabinoid.

[0055] In some embodiments, relative to the sequence of SEQ ID NO: 14, the TS further comprises an amino acid substitution at one or more residues corresponding to positions 31, 40, 41, 46, 49, 51, 56, 59, 61, 63, 74, 90, 96, 100, 103, 116, 143, 173, 196, 250, 257, 290, 296, 311, 354, 377, 378, 411, 417, 446, 494, 495, 528, 542, 543 and/or 544 in SEQ ID NO: 14, wherein the TS does not comprise the sequence of SEQ ID NO: 20, 21, 320 or 321.

[0056] In some embodiments, the TS comprises: the amino acid Q at a residue corresponding to position 31 in SEQ ID NO: 14; the amino acid H or Q at a residue corresponding to position 36 in SEQ ID NO: 14; the amino acid E or Q at a residue corresponding to position 40 in SEQ ID NO: 14; the amino acid Y at a residue corresponding to position 41 in SEQ ID NO: 14; the amino acid T at a residue corresponding to position 44 in SEQ ID NO: 14, the amino acid A or P at a residue corresponding to position 46 in SEQ ID NO: 14; the amino acid T at a residue corresponding to position 47 in SEQ ID NO: 14; the amino acid A at a residue corresponding to position 49 in SEQ ID NO: 14; the amino acid F at a residue corresponding to position 51 in SEQ ID NO: 14; the amino acid I at a residue corresponding to position 52 in SEQ ID NO: 14; the amino acid N at a residue corresponding to position 56 in SEQ ID NO: 14, the amino acid P or S at a residue corresponding to position 58 in SEQ ID NO: 14; the amino acid F at a residue corresponding to position 59 in SEQ ID NO: 14; the amino acid S at a residue corresponding to position 61 in SEQ ID NO: 14; the amino acid L or V at a residue corresponding to position 63 in SEQ ID NO: 14; the amino acid T at a residue corresponding to position 74 in SEQ ID NO: 14; the amino acid N at a residue corresponding to position 76 in SEQ ID NO: 14; the amino acid I at a residue corresponding to position 85 in SEQ ID NO: 14; the amino acid L at a residue corresponding to position 88 in SEQ ID NO: 14; the amino acid D, E, or H at a residue corresponding to position 89 in SEQ ID NO: 14; the amino acid E or V at a residue corresponding to position 90 in SEQ ID NO: 14; the amino acid G at a residue corresponding to position 95 in SEQ ID NO: 14; the amino acid S at a residue corresponding to position 96 in SEQ ID NO: 14; the amino acid A at a residue corresponding to position 100 in SEQ ID NO: 14; the amino acid I at a residue corresponding to position 103 in SEQ ID NO: 14; the amino acid S at a residue corresponding to position 116 in SEQ ID NO: 14; the amino acid I at a residue corresponding to position 129 in SEQ ID NO: 14; the amino acid R at a residue corresponding to position 136 in SEQ ID NO: 14; the amino acid E at a residue corresponding to position 143 in SEQ ID NO: 14; the amino acid Q at a residue corresponding to position 150 in SEQ ID NO: 14; the amino acid L at a residue corresponding to position 158 in SEQ ID NO: 14; the amino acid A at a residue corresponding to position 173 in SEQ ID NO: 14; the amino acid A at a residue corresponding to position 181 in SEQ ID NO: 14; the amino acid K at a residue corresponding to position 196 in SEQ ID NO: 14; the amino acid D at a residue corresponding to position 211 in SEQ ID NO: 14; the amino acid S at a residue corresponding to position 237 in SEQ ID NO: 14; the amino acid V at a residue corresponding to position 242 in SEQ ID NO: 14; the amino acid R at a residue corresponding to position 247 in SEQ ID NO: 14; the amino acid D or P at a residue corresponding to position 250 in SEQ ID NO: 14; the amino acid V at a residue corresponding to position 255 in SEQ ID NO: 14; the amino acid M or R at a residue corresponding to position 257 in SEQ ID NO: 14; the amino acid N at a residue corresponding to position 267 in SEQ ID NO: 14; the amino acid E at a residue corresponding to position 268 in SEQ ID NO: 14; the amino acid V at a residue corresponding to position 273 in SEQ ID NO: 14; the amino acid H at a residue corresponding to position 274 in SEQ ID NO: 14; the amino acid L, M, or T at a residue corresponding to position 288 in SEQ ID NO: 14; the amino acid F at a residue corresponding to position 290 in SEQ ID NO: 14; the amino acid R at a residue corresponding to position 296 in SEQ ID NO: 14; the amino acid Q at a residue corresponding to position 302 in SEQ ID NO: 14; the amino acid I at a residue corresponding to position 309 in SEQ ID NO: 14; the amino acid S at a residue corresponding to position 311 in SEQ ID NO: 14; the amino acid L at a residue corresponding to position 318 in SEQ ID NO: 14; the amino acid Q at a residue corresponding to position 329 in SEQ ID NO: 14; the amino acid E at a residue corresponding to position 340 in SEQ ID NO: 14; the amino acid Q at a residue corresponding to position 344 in SEQ ID NO: 14; the amino acid L or M at a residue corresponding to position 345 in SEQ ID NO: 14; the amino acid I at a residue corresponding to position 351 in SEQ ID NO: 14; the amino acid F at a residue corresponding to position 354 in SEQ ID NO: 14; the amino acid Y at a residue corresponding to position 360 in SEQ ID NO: 14; the amino acid D at a residue corresponding to position 361 in SEQ ID NO: 14; the amino acid T at a residue corresponding to position 363 in SEQ ID NO: 14; the amino acid Q at a residue corresponding to position 377 in SEQ ID NO: 14; the amino acid N at a residue corresponding to position 378 in SEQ ID NO: 14; the amino acid A at a residue corresponding to position 379 in SEQ ID NO: 14; the amino acid K at a residue corresponding to position 382 in SEQ ID NO: 14; the amino acid V at a residue corresponding to position 396 in SEQ ID NO: 14; the amino acid V at a residue corresponding to position 411 in SEQ ID NO: 14; the amino acid V at a residue corresponding to position 417 in SEQ ID NO: 14; the amino acid F at a residue corresponding to position 419 in SEQ ID NO: 14; the amino acid D at a residue corresponding to position 424 in SEQ ID NO: 14; the amino acid I at a residue corresponding to position 443 in SEQ ID NO: 14; the amino acid I at a residue corresponding to position 446 in SEQ ID NO: 14; the amino acid L at a residue corresponding to position 459 in SEQ ID NO: 14; the amino acid I at a residue corresponding to position 462 in SEQ ID NO: 14; the amino acid N at a residue corresponding to position 464 in SEQ ID NO: 14; the amino acid M at a residue corresponding to position 469 in SEQ ID NO: 14; the amino acid K at a residue corresponding to position 475 in SEQ ID NO: 14; the amino acid M at a residue corresponding to position 479 in SEQ ID NO: 14; the amino acid M at a residue corresponding to position 491 in SEQ ID NO: 14; the amino acid N at a residue corresponding to position 492 in SEQ ID NO: 14; the amino acid D, E, F, or P at a residue corresponding to position 494 in SEQ ID NO: 14; the amino acid E or K at a residue corresponding to position 495 in SEQ ID NO: 14; the amino acid Q at a residue corresponding to position 499 in SEQ ID NO: 14; the amino acid D at a residue corresponding to position 528 in SEQ ID NO: 14; the amino acid L or R at a residue corresponding to position 542 in SEQ ID NO: 14; the amino acid R at a residue corresponding to position 543 in SEQ ID NO: 14; and/or the amino acid R at a residue corresponding to position 544 in SEQ ID NO: 14.

[0057] In some embodiments, the TS comprises: the amino acid H or Q at a residue corresponding to position 36 in SEQ ID NO: 14; the amino acid T at a residue corresponding to position 44 in SEQ ID NO: 14; the amino acid T at a residue corresponding to position 47 in SEQ ID NO: 14; the amino acid I at a residue corresponding to position 52 in SEQ ID NO: 14; the amino acid P or S at a residue corresponding to position 58 in SEQ ID NO: 14; the amino acid I at a residue corresponding to position 85 in SEQ ID NO: 14; the amino acid L at a residue corresponding to position 88 in SEQ ID NO: 14; the amino acid D, E, or H at a residue corresponding to position 89 in SEQ ID NO: 14; the amino acid G at a residue corresponding to position 95 in SEQ ID NO: 14; the amino acid I at a residue corresponding to position 129 in SEQ ID NO: 14; the amino acid R at a residue corresponding to position 136 in SEQ ID NO: 14; the amino acid Q at a residue corresponding to position 150 in SEQ ID NO: 14; the amino acid L at a residue corresponding to position 158 in SEQ ID NO: 14; the amino acid A at a residue corresponding to position 181 in SEQ ID NO: 14; the amino acid D at a residue corresponding to position 211 in SEQ ID NO: 14; the amino acid S at a residue corresponding to position 237 in SEQ ID NO: 14; the amino acid V at a residue corresponding to position 242 in SEQ ID NO: 14; the amino acid R at a residue corresponding to position 247 in SEQ ID NO: 14; the amino acid V at a residue corresponding to position 255 in SEQ ID NO: 14; the amino acid N at a residue corresponding to position 267 in SEQ ID NO: 14; the amino acid E at a residue corresponding to position 268 in SEQ ID NO: 14; the amino acid V at a residue corresponding to position 273 in SEQ ID NO: 14; the amino acid H at a residue corresponding to position 274 in SEQ ID NO: 14; the amino acid L, M, or T at a residue corresponding to position 288 in SEQ ID NO: 14; the amino acid Q at a residue corresponding to position 302 in SEQ ID NO: 14; the amino acid I at a residue corresponding to position 309 in SEQ ID NO: 14; the amino acid L at a residue corresponding to position 318 in SEQ ID NO: 14, the amino acid Q at a residue corresponding to position 329 in SEQ ID NO: 14; the amino acid E at a residue corresponding to position 340 in SEQ ID NO. 14; the amino acid Q at a residue corresponding to position 344 in SEQ ID NO: 14; the amino acid L or M at a residue corresponding to position 345 in SEQ ID NO: 14; the amino acid I at a residue corresponding to position 351 in SEQ ID NO: 14; the amino acid Y at a residue corresponding to position 360 in SEQ ID NO: 14; the amino acid D at a residue corresponding to position 361 in SEQ ID NO: 14; the amino acid T at a residue corresponding to position 363 in SEQ ID NO: 14; the amino acid A at a residue corresponding to position 379 in SEQ ID NO: 14; the amino acid K at a residue corresponding to position 382 in SEQ ID NO: 14; the amino acid V at a residue corresponding to position 396 in SEQ ID NO: 14; the amino acid F at a residue corresponding to position 419 in SEQ ID NO: 14; the amino acid D at a residue corresponding to position 424 in SEQ ID NO: 14; the amino acid I at a residue corresponding to position 443 in SEQ ID NO: 14; the amino acid L at a residue corresponding to position 459 in SEQ ID NO: 14; the amino acid I at a residue corresponding to position 462 in SEQ ID NO: 14; the amino acid N at a residue corresponding to position 464 in SEQ ID NO: 14; the amino acid M at a residue corresponding to position 469 in SEQ ID NO: 14; the amino acid M at a residue corresponding to position 479 in SEQ ID NO: 14; the amino acid M at a residue corresponding to position 491 in SEQ ID NO: 14; the amino acid N at a residue corresponding to position 492 in SEQ ID NO: 14; and/or the amino acid Q at a residue corresponding to position 499 in SEQ ID NO: 14.

[0058] In some embodiments, the TS comprises relative to SEQ ID NO: 14: R31Q, H56N, Q58S, M61 S, 174T, N90V, H143E, A250P, S255V, V288L, T340E, F345L, E424D, Q475K, T492N, and P542L; R31Q, V52I, H56N, Q58S, M61 S, I74T, N90V, A250P, S255V, V288L, F345L, Q475K, and T492N; R31Q, A47T, V52I, H56N, Q58S, M61S, I74T, N90V, H143E, A250P, S255V, V288L, T340E, F345L, Q475K, and T492N; H56N, Q58S, M61S, I74T, N90V, H143E, A250D, S255V, V288L, F345L, Q475K, T492N, and A495E; R31Q, H56N, Q58S, M61S, I74T, N90V, H143E, A250P, S255V, V288L, Q475K, and T492N; R31Q, A47T, H56N, Q58S, M61S, I74T, N90V, H143E, A250P, S255V, V288L, T340E, F345L, E424D, Q475K, and T492N; A47T, H56N, Q58S, M61S, I74T, N90V, A250D, S255V, F345L, E424D, Q475K, and T492N; R31Q, A47T, H56N, Q58S, M61S, 174T, N90V, A250P, S255V, V288L, T340E, F345L, Q475K, and T492N; R31Q, A47T, H56N, Q58S, M61S, 174T, N90V, H143E, A250P, S255V, V288L, T340E, F345L, Q475K, and T492N; A47T, H56N, Q58S, M61S, 174T, N90V, A250D, S255V, F345L, Q475K, and T492N; R31Q, A47T, H56N, Q58S, M61 S, 174T, N90V, H143E, A250P, S255V, T340E, F345L, Q475K, and T492N; R31Q, H56N, Q58S, M61S, I74T, N90V, A250P, S255V, V288L, F345L, E424D, Q475K, and T492N; R31Q, A47T, H56N, Q58S, M61S, I74T, N90V, A250P, S255V, T340E, F345L, E424D, Q475K, and T492N; A47T, H56N, Q58S, M61S, 174T, N90V, A250D, S255V, V288L, F345L, Q475K, and T492N; H56N, Q58S, M61S, I74T, N90V, H143E, A250D, S255V, V288L, F345L, Q475K, and T492N; or R31Q, V52I, H56N, M61S, I74T, N90V, A250P, S255V, F345L, Q475K, and T492N.

[0059] In some embodiments, the TS comprises relative to SEQ ID NO: 14: M61S, N90V, A250D, S255V, Q475K, T492N, and A495E; H56N, M61S, 174T, N90V, A250P, S255V, T492N, and H494E; or R31Q, H56N, I74T, N90V, A250P, S255V, Q475K, T492N, H494E, and A495E.

[0060] In some embodiments, the TS comprises a sequence that is at least 90%, at least 95%, at least 97%, at least 98%, at least 99% identical, or is 100% identical to any one of SEQ ID NOs: 138, 140, 141, 144, 155, 158, 164, 178, 198-200, 203, 285-289, 290-313, 474-487, 490-491, 499, 501-502, 504-505, 512, 515-517, 521-522, 524, 526-529, 532, 534-536, 538, 542-545, 548-605, 698-802, 804-811, 813-815, 820, 824, 826, 828-832, 834, 837-838, 845, 848, 850-851, 876, and 884-913, or a conservatively substituted version thereof.

[0061] Further aspects of the disclosure relate to non-naturally occurring TSs, wherein relative to the sequence of SEQ ID NO: 13, the TS comprises an amino acid substitution at one or more residues corresponding to positions 79, 90, 106, 150, 166, 184, 211, 216, 230, 263, 273, 283, 290, 292, 319, 322, 339, 353, 380, 386, 397, 407, 416, 418, 441, 442, 446, 479,450, 452, 454, 467, 481, 486, 504, and/or 512 in SEQ ID NO: 13, and wherein the TS is capable of producing a CBD-type cannabinoid.

[0062] In some embodiments, relative to the sequence of SEQ ID NO: 13, the TS further comprises an amino acid substitution at one or more residues corresponding to positions 31, 47, 49, 50, 56, 57, 58, 69, 89, 95, 100, 103, 116, 124, 143, 162, 167, 168, 171, 172, 175, 180, 196, 213, 250, 287, 343, 344, 376, 377, 378, 394, 410, 414, 415, 445, 490, 492, 517 and/or 542 in SEQ ID NO: 13.

[0063] In some embodiments, the TS comprises: the amino acid Q at a residue corresponding to position 31 in SEQ ID NO: 13; the amino acid A at a residue corresponding to position 47 in SEQ ID NO: 13; the amino acid P at a residue corresponding to position 49 in SEQ ID NO: 13; the amino acid N at a residue corresponding to position 50 in SEQ ID NO: 13; the amino acid H at a residue corresponding to position 56 in SEQ ID NO: 13; the amino acid D at a residue corresponding to position 57 in SEQ ID NO: 13; the amino acid Q at a residue corresponding to position 58 in SEQ ID NO: 13; the amino acid R or Q at a residue corresponding to position 69 in SEQ ID NO: 13; the amino acid G at a residue corresponding to position 79 in SEQ ID NO: 13; the amino acid N, D, E, Q, or R at a residue corresponding to position 89 in SEQ ID NO: 13; the amino acid C at a residue corresponding to position 90 in SEQ ID NO: 13; the amino acid A at a residue corresponding to position 95 in SEQ ID NO: 13; the amino acid A at a residue corresponding to position 100 in SEQ ID NO: 13; the amino acid H at a residue corresponding to position 103 in SEQ ID NO: 13; the amino acid E at a residue corresponding to position 106 in SEQ ID NO: 13, the amino acid A or G at a residue corresponding to position 116 in SEQ ID NO: 13, the amino acid N or M at a residue corresponding to position 124 in SEQ ID NO: 13; the amino acid E at a residue corresponding to position 143 in SEQ ID NO: 13; the amino acid Q at a residue corresponding to position 150 in SEQ ID NO: 13; the amino acid I at a residue corresponding to position 162 in SEQ ID NO: 13; the amino acid S at a residue corresponding to position 166 in SEQ ID NO: 13; the amino acid K at a residue corresponding to position 167 in SEQ ID NO: 13; the amino acid T at a residue corresponding to position 168 in SEQ ID NO: 13; the amino acid F at a residue corresponding to position 171 in SEQ ID NO: 13; the amino acid P at a residue corresponding to position 172 in SEQ ID NO: 13; the amino acid F at a residue corresponding to position 175 in SEQ ID NO: 13; the amino acid G at a residue corresponding to position 180 in SEQ ID NO: 13; the amino acid F at a residue corresponding to position 184 in SEQ ID NO: 13; the amino acid K at a residue corresponding to position 196 in SEQ ID NO: 13; the amino acid D at a residue corresponding to position 211 in SEQ ID NO: 13; the amino acid N at a residue corresponding to position 213 in SEQ ID NO: 13; the amino acid L at a residue corresponding to position 216 in SEQ ID NO: 13; the amino acid I at a residue corresponding to position 230 in SEQ ID NO: 13; the amino acid R at a residue corresponding to position 250 in SEQ ID NO: 13; the amino acid L at a residue corresponding to position 263 in SEQ ID NO: 13; the amino acid H at a residue corresponding to position 273 in SEQ ID NO: 13; the amino acid P at a residue corresponding to position 283 in SEQ ID NO: 13; the amino acid T at a residue corresponding to position 287 in SEQ ID NO: 13; the amino acid M or A at a residue corresponding to position 290 in SEQ ID NO: 13; the amino acid M at a residue corresponding to position 292 in SEQ ID NO: 13; the amino acid D or N at a residue corresponding to position 319 in SEQ ID NO: 13; the amino acid E at a residue corresponding to position 322 in SEQ ID NO: 13; the amino acid E at a residue corresponding to position 339 in SEQ ID NO: 13; the amino acid E at a residue corresponding to position 343 in SEQ ID NO: 13; the amino acid M at a residue corresponding to position 344 in SEQ ID NO: 13; the amino acid M at a residue corresponding to position 353 in SEQ ID NO: 13; the amino acid L, Y, A, G, N, P, R, S, T, or V at a residue corresponding to position 376 in SEQ ID NO: 13; the amino acid F, P, or R at a residue corresponding to position 377 in SEQ ID NO: 13; the amino acid K, R, S, or T at a residue corresponding to position 378 in SEQ ID NO: 13; the amino acid Y at a residue corresponding to position 380 in SEQ ID NO: 13; the amino acid F at a residue corresponding to position 386 in SEQ ID NO: 13; the amino acid E at a residue corresponding to position 394 in SEQ ID NO: 13; the amino acid E or K at a residue corresponding to position 397 in SEQ ID NO: 13; the amino acid E at a residue corresponding to position 407 in SEQ ID NO: 13; the amino acid T or V at a residue corresponding to position 410 in SEQ ID NO: 13; the amino acid I, L, M, T, or V at a residue corresponding to position 414 in SEQ ID NO: 13; the amino acid M at a residue corresponding to position 415 in SEQ ID NO: 13; the amino acid F, I, or M at a residue corresponding to position 416 in SEQ ID NO: 13; the amino acid F at a residue corresponding to position 418 in SEQ ID NO: 13; the amino acid S or T at a residue corresponding to position 441 in SEQ ID NO: 13; the amino acid I at a residue corresponding to position 442 in SEQ ID NO: 13; the amino acid V or A at a residue corresponding to position 445 in SEQ ID NO: 13; the amino acid T or V at a residue corresponding to position 446 in SEQ ID NO: 13; the amino acid S at a residue corresponding to position 450 in SEQ ID NO: 13; the amino acid T at a residue corresponding to position 452 in SEQ ID NO: 13; the amino acid A at a residue corresponding to position 454 in SEQ ID NO: 13; the amino acid Y at a residue corresponding to position 467 in SEQ ID NO: 13; the amino acid S or T at a residue corresponding to position 479 in SEQ ID NO: 13; the amino acid I, M, V, or Y at a residue corresponding to position 481 in SEQ ID NO: 13; the amino acid V at a residue corresponding to position 486 in SEQ ID NO: 13; the amino acid T at a residue corresponding to position 490 in SEQ ID NO: 13; the amino acid N at a residue corresponding to position 492 in SEQ ID NO. 13; the amino acid Q at a residue corresponding to position 504 in SEQ ID NO: 13; the amino acid N at a residue corresponding to position 512 in SEQ ID NO: 13; the amino acid D at a residue corresponding to position 527 in SEQ ID NO: 13, and/or the amino acid M at a residue corresponding to position 542 in SEQ ID NO: 13.

[0064] In some embodiments, the TS comprises: the amino acid G at a residue corresponding to position 79 in SEQ ID NO: 13; the amino acid C at a residue corresponding to position 90 in SEQ ID NO: 13; the amino acid E at a residue corresponding to position 106 in SEQ ID NO: 13; the amino acid Q at a residue corresponding to position 150 in SEQ ID NO: 13; the amino acid S at a residue corresponding to position 166 in SEQ ID NO: 13; the amino acid D at a residue corresponding to position 211 in SEQ ID NO: 13; the amino acid N at a residue corresponding to position 213 in SEQ ID NO: 13; the amino acid L at a residue corresponding to position 216 in SEQ ID NO: 13; the amino acid I at a residue corresponding to position 230 in SEQ ID NO: 13; the amino acid L at a residue corresponding to position 263 in SEQ ID NO: 13; the amino acid H at a residue corresponding to position 273 in SEQ ID NO: 13; the amino acid P at a residue corresponding to position 283 in SEQ ID NO: 13; the amino acid T at a residue corresponding to position 287 in SEQ ID NO: 13; the amino acid M or A at a residue corresponding to position 290 in SEQ ID NO: 13; the amino acid M at a residue corresponding to position 292 in SEQ ID NO: 13; the amino acid D or N at a residue corresponding to position 319 in SEQ ID NO: 13; the amino acid E at a residue corresponding to position 322 in SEQ ID NO: 13; the amino acid E at a residue corresponding to position 339 in SEQ ID NO: 13; the amino acid E at a residue corresponding to position 343 in SEQ ID NO: 13; the amino acid M at a residue corresponding to position 344 in SEQ ID NO: 13; the amino acid M at a residue corresponding to position 353 in SEQ ID NO: 13; the amino acid Y at a residue corresponding to position 380 in SEQ ID NO: 13; the amino acid F at a residue corresponding to position 386 in SEQ ID NO: 13; the amino acid E at a residue corresponding to position 394 in SEQ ID NO: 13, the amino acid E or K at a residue corresponding to position 397 in SEQ ID NO: 13; the amino acid E at a residue corresponding to position 407 in SEQ ID NO: 13; the amino acid F, I, or M at a residue corresponding to position 416 in SEQ ID NO: 13; the amino acid F at a residue corresponding to position 418 in SEQ ID NO: 13; the amino acid S or T at a residue corresponding to position 441 in SEQ ID NO: 13; the amino acid I at a residue corresponding to position 442 in SEQ ID NO: 13; the amino acid T or V at a residue corresponding to position 446 in SEQ ID NO: 13; the amino acid S at a residue corresponding to position 450 in SEQ ID NO: 13; the amino acid S or T at a residue corresponding to position 479 in SEQ ID NO: 13; the amino acid I, M, V, or Y at a residue corresponding to position 481 in SEQ ID NO: 13; the amino acid V at a residue corresponding to position 486 in SEQ ID NO: 13; the amino acid T at a residue corresponding to position 490 in SEQ ID NO: 13; the amino acid Q at a residue corresponding to position 504 in SEQ ID NO: 13; and/or the amino acid N at a residue corresponding to position 512 in SEQ ID NO: 13.

[0065] In some embodiments, the TS comprises relative to SEQ ID NO. 13: K50N, G95A, N196K, H213N, T339E, Q343E, L344M, and A414V; G95A, Y175F, T339E, Q343E, and A414V; G95A, S116A, T339E, Q343E, A414V, and N527D; G95A, E150Q, V1621, C180G, N196K, N211D, N273H, T339E, Q343E, and A414V; G95A, T339E, Q343E, Q376V, and A414V; K50N, G95A, S100A, E150Q, V1621, C180G, N196K, N211 D, H213N, S322E, T339E, Q343E, L344M, A414V, E452T, and 1504Q; G95A, N196K, T339E, Q343E, and A414V; 50N, G95A, V103H, H213N, T339E, Q343E, L344M, and A414V; G95A, T339E, Q343E, Q376R, and A414V; or K50N, H213N, L230I, T339E, Q343E, and L344M.

[0066] In some embodiments, the TS comprises relative to SEQ ID NO: 13: K50N, H213N, L230I, T339E, Q343E, and L344M; S100A, T339E, and Q343E; T339E, Q343E, L344M, and N527D; K50N, V1621, C180G, N196K, N211D, H213N, T339E, Q343E, and L344M; K50N, E150Q, V162I, C180G, N196K, N211 D, H213N, T339E, Q343E, and L344M; S116A, H213N, T339E, Q343E, L344M, and N527D; N196K, T339E, and Q343E; K50N, E150Q, V162L, A172P, C180G, N196K, N211D, H213N, T339E, Q343E, and L344M; V216L, T339E, and Q343E; S116A, H213N, T339E, Q343E, and N527D; S116A, T339E, Q343E, and N527D; or T339E, Q343E, and Q376P.

[0067] In some embodiments, the TS comprises a sequence that is at least 90%, at least 95%, at least 97%, at least 98%, at least 99% identical or is 100% identical to any one of SEQ ID NOs: 143, 149, 151-153, 156, 160, 163, 165, 166, 168, 170-172, 175-180, 182-197, 201, 204, 205, 207-225, 464-473, 478-480, 484-485, 487-489, 492-498, 500, 503, 506-548, 550, 551-552, 556, 558, 565, 567, 569-570, 572-578, 582, 584, 586, 588, 591, 593-595, 597, 600, 602, 604, 605, 718, 755, 784, 786, 790-792, 794, 795, 798, 800, 801, 803, 804, 806-810, 812-821, 823, 825, 827-836, 838, 839, 841-868, 870-874, 875-879, 881, 883, 913-932, 939-941, 944, 945, 946, and 948, or a conservatively substituted version thereof.

[0068] Further aspects of the disclosure relate to non-naturally occurring TSs, wherein relative to the sequence of SEQ ID NO: 14, the TS comprises an amino acid substitution at one or more residues corresponding to positions 41, 47, 49, 51, 52, 56, 58, 61, 63, 95, 96, 103, 116, 129, 136, 143, 158, 173, 181, 237, 242, 247, 257, 268, 273, 296, 302, 309, 311, 340, 344, 345, 351, 354, 360, 361, 363, 377, 378, 379, 382, 396, 411, 424, 425, 430, 442, 443, 446, 447, 459, 462, 464, 465, 469, 475, 479, 489, 491, 492, 493, 494, 496, 516, 524, 528, 542, 543, and/or 544 in SEQ ID NO: 14, and wherein the TS is capable of producing a CBC-type cannabinoid.

[0069] In some embodiments, relative to the sequence of SEQ ID NO: 14, the TS further comprises an amino acid substitution at one or more residues corresponding to positions 31, 40, 46, 74, 90, 255, 288, 290, 318, and/or 495 in SEQ ID NO: 14.

[0070] In some embodiments, the TS comprises: the amino acid Q at a residue corresponding to position 31 in SEQ ID NO: 14; the amino acid E at a residue corresponding to position 40 in SEQ ID NO: 14; the amino acid Y at a residue corresponding to position 41 in SEQ ID NO: 14; the amino acid P at a residue corresponding to position 46 in SEQ ID NO: 14; the amino acid T at a residue corresponding to position 47 in SEQ ID NO: 14; the amino acid A at a residue corresponding to position 49 in SEQ ID NO: 14; the amino acid F at a residue corresponding to position 51 in SEQ ID NO: 14; the amino acid I at a residue corresponding to position 52 in SEQ ID NO: 14; the amino acid N at a residue corresponding to position 56 in SEQ ID NO: 14; the amino acid S at a residue corresponding to position 58 in SEQ ID NO: 14; the amino acid S at a residue corresponding to position 61 in SEQ ID NO: 14; the amino acid V or L at a residue corresponding to position 63 in SEQ ID NO: 14, the amino acid T at a residue corresponding to position 74 in SEQ ID NO: 14; the amino acid V at a residue corresponding to position 90 in SEQ ID NO: 14; the amino acid G at a residue corresponding to position 95 in SEQ ID NO: 14; the amino acid S at a residue corresponding to position 96 in SEQ ID NO: 14; the amino acid I at a residue corresponding to position 103 in SEQ ID NO: 14; the amino acid S at a residue corresponding to position 116 in SEQ ID NO: 14; the amino acid I at a residue corresponding to position 129 in SEQ ID NO: 14; the amino acid R at a residue corresponding to position 136 in SEQ ID NO: 14; the amino acid E at a residue corresponding to position 143 in SEQ ID NO: 14; the amino acid L at a residue corresponding to position 158 in SEQ ID NO: 14; the amino acid A at a residue corresponding to position 173 in SEQ ID NO: 14; the amino acid A at a residue corresponding to position 181 in SEQ ID NO: 14; the amino acid S at a residue corresponding to position 237 in SEQ ID NO: 14; the amino acid V at a residue corresponding to position 242 in SEQ ID NO: 14; the amino acid R at a residue corresponding to position 247 in SEQ ID NO: 14; the amino acid V at a residue corresponding to position 255 in SEQ ID NO: 14; the amino acid M at a residue corresponding to position 257 in SEQ ID NO: 14; the amino acid E at a residue corresponding to position 268 in SEQ ID NO: 14; the amino acid V at a residue corresponding to position 273 in SEQ ID NO: 14; the amino acid L at a residue corresponding to position 288 in SEQ ID NO: 14; the amino acid F at a residue corresponding to position 290 in SEQ ID NO: 14; the amino acid R at a residue corresponding to position 296 in SEQ ID NO: 14; the amino acid Q at a residue corresponding to position 302 in SEQ ID NO: 14; the amino acid I at a residue corresponding to position 309 in SEQ ID NO: 14; the amino acid S at a residue corresponding to position 311 in SEQ ID NO: 14; the amino acid L at a residue corresponding to position 318 in SEQ ID NO: 14; the amino acid E at a residue corresponding to position 340 in SEQ ID NO: 14; the amino acid Q at a residue corresponding to position 344 in SEQ ID NO: 14; the amino acid L at a residue corresponding to position 345 in SEQ ID NO: 14; the amino acid I at a residue corresponding to position 351 in SEQ ID NO: 14; the amino acid F at a residue corresponding to position 354 in SEQ ID NO: 14; the amino acid Y at a residue corresponding to position 360 in SEQ ID NO: 14; the amino acid D at a residue corresponding to position 361 in SEQ ID NO: 14; the amino acid T at a residue corresponding to position 363 in SEQ ID NO: 14; the amino acid Q at a residue corresponding to position 377 in SEQ ID NO: 14; the amino acid N at a residue corresponding to position 378 in SEQ ID NO: 14; the amino acid A at a residue corresponding to position 379 in SEQ ID NO: 14; the amino acid S at a residue corresponding to position 382 in SEQ ID NO: 14; the amino acid V at a residue corresponding to position 396 in SEQ ID NO: 14; the amino acid V at a residue corresponding to position 411 in SEQ ID NO: 14; the amino acid D at a residue corresponding to position 424 in SEQ ID NO: 14; the amino acid K at a residue corresponding to position 425 in SEQ ID NO: 14; the amino acid T at a residue corresponding to position 430 in SEQ ID NO: 14; the amino acid I at a residue corresponding to position 442 in SEQ ID NO: 14; the amino acid I or V at a residue corresponding to position 443 in SEQ ID NO: 14; the amino acid I at a residue corresponding to position 446 in SEQ ID NO: 14; the amino acid C at a residue corresponding to position 447 in SEQ ID NO: 14; the amino acid L at a residue corresponding to position 459 in SEQ ID NO: 14; the amino acid I at a residue corresponding to position 462 in SEQ ID NO: 14; the amino acid N at a residue corresponding to position 464 in SEQ ID NO: 14; the amino acid I at a residue corresponding to position 465 in SEQ ID NO: 14; the amino acid M at a residue corresponding to position 469 in SEQ ID NO: 14; the amino acid K at a residue corresponding to position 475 in SEQ ID NO: 14; the amino acid M at a residue corresponding to position 479 in SEQ ID NO: 14; the amino acid I at a residue corresponding to position 489 in SEQ ID NO: 14; the amino acid I at a residue corresponding to position 491 in SEQ ID NO: 14; the amino acid N at a residue corresponding to position 492 in SEQ ID NO: 14; the amino acid D at a residue corresponding to position 493 in SEQ ID NO: 14; the amino acid F or P at a residue corresponding to position 494 in SEQ ID NO: 14; the amino acid E or K at a residue corresponding to position 495 in SEQ ID NO: 14; the amino acid N at a residue corresponding to position 496 in SEQ ID NO: 14; the amino acid D at a residue corresponding to position 516 in SEQ ID NO: 14; the amino acid L at a residue corresponding to position 524 in SEQ ID NO: 14; the amino acid D at a residue corresponding to position 528 in SEQ ID NO: 14; the amino acid L or R at a residue corresponding to position 542 in SEQ ID NO: 14; the amino acid R at a residue corresponding to position 543 in SEQ ID NO: 14; and/or the amino acid R at a residue corresponding to position 544 in SEQ ID NO: 14.

[0071] In some embodiments, the TS comprises: the amino acid Y at a residue corresponding to position 41 in SEQ ID NO: 14; the amino acid T at a residue corresponding to position 47 in SEQ ID NO: 14; the amino acid A at a residue corresponding to position 49 in SEQ ID NO: 14; the amino acid F at a residue corresponding to position 51 in SEQ ID NO: 14; the amino acid I at a residue corresponding to position 52 in SEQ ID NO: 14; the amino acid N at a residue corresponding to position 56 in SEQ ID NO: 14; the amino acid S at a residue corresponding to position 58 in SEQ ID NO: 14; the amino acid S at a residue corresponding to position 61 in SEQ ID NO: 14, the amino acid V or L at a residue corresponding to position 63 in SEQ ID NO: 14; the amino acid G at a residue corresponding to position 95 in SEQ ID NO: 14; the amino acid S at a residue corresponding to position 96 in SEQ ID NO: 14; the amino acid I at a residue corresponding to position 103 in SEQ ID NO: 14; the amino acid S at a residue corresponding to position 116 in SEQ ID NO: 14; the amino acid I at a residue corresponding to position 129 in SEQ ID NO: 14, the amino acid R at a residue corresponding to position 136 in SEQ ID NO: 14; the amino acid E at a residue corresponding to position 143 in SEQ ID NO: 14; the amino acid L at a residue corresponding to position 158 in SEQ ID NO: 14; the amino acid A at a residue corresponding to position 173 in SEQ ID NO: 14; the amino acid A at a residue corresponding to position 181 in SEQ ID NO: 14; the amino acid S at a residue corresponding to position 237 in SEQ ID NO: 14; the amino acid V at a residue corresponding to position 242 in SEQ ID NO: 14; the amino acid R at a residue corresponding to position 247 in SEQ ID NO: 14; the amino acid M at a residue corresponding to position 257 in SEQ ID NO: 14; the amino acid E at a residue corresponding to position 268 in SEQ ID NO: 14; the amino acid V at a residue corresponding to position 273 in SEQ ID NO: 14; the amino acid R at a residue corresponding to position 296 in SEQ ID NO: 14; the amino acid Q at a residue corresponding to position 302 in SEQ ID NO: 14; the amino acid I at a residue corresponding to position 309 in SEQ ID NO: 14; the amino acid S at a residue corresponding to position 311 in SEQ ID NO: 14; the amino acid E at a residue corresponding to position 340 in SEQ ID NO: 14; the amino acid Q at a residue corresponding to position 344 in SEQ ID NO: 14; the amino acid L at a residue corresponding to position 345 in SEQ ID NO: 14; the amino acid I at a residue corresponding to position 351 in SEQ ID NO: 14; the amino acid F at a residue corresponding to position 354 in SEQ ID NO: 14; the amino acid Y at a residue corresponding to position 360 in SEQ ID NO: 14; the amino acid D at a residue corresponding to position 361 in SEQ ID NO: 14; the amino acid T at a residue corresponding to position 363 in SEQ ID NO: 14; the amino acid Q at a residue corresponding to position 377 in SEQ ID NO: 14; the amino acid N at a residue corresponding to position 378 in SEQ ID NO: 14; the amino acid A at a residue corresponding to position 379 in SEQ ID NO: 14; the amino acid S at a residue corresponding to position 382 in SEQ ID NO: 14; the amino acid V at a residue corresponding to position 396 in SEQ ID NO: 14; the amino acid V at a residue corresponding to position 411 in SEQ ID NO: 14; the amino acid D at a residue corresponding to position 424 in SEQ ID NO: 14; the amino acid K at a residue corresponding to position 425 in SEQ ID NO: 14; the amino acid T at a residue corresponding to position 430 in SEQ ID NO: 14; the amino acid I at a residue corresponding to position 442 in SEQ ID NO: 14; the amino acid I or V at a residue corresponding to position 443 in SEQ ID NO: 14; the amino acid I at a residue corresponding to position 446 in SEQ ID NO: 14; the amino acid C at a residue corresponding to position 447 in SEQ ID NO: 14; the amino acid L at a residue corresponding to position 459 in SEQ ID NO: 14; the amino acid I at a residue corresponding to position 462 in SEQ ID NO: 14; the amino acid N at a residue corresponding to position 464 in SEQ ID NO: 14; the amino acid I at a residue corresponding to position 465 in SEQ ID NO: 14; the amino acid M at a residue corresponding to position 469 in SEQ ID NO: 14; the amino acid K at a residue corresponding to position 475 in SEQ ID NO: 14; the amino acid M at a residue corresponding to position 479 in SEQ ID NO: 14; the amino acid I at a residue corresponding to position 489 in SEQ ID NO: 14; the amino acid I at a residue corresponding to position 491 in SEQ ID NO: 14; the amino acid N at a residue corresponding to position 492 in SEQ ID NO: 14; the amino acid D at a residue corresponding to position 493 in SEQ ID NO: 14; the amino acid F or P at a residue corresponding to position 494 in SEQ ID NO: 14; the amino acid N at a residue corresponding to position 496 in SEQ ID NO: 14; the amino acid D at a residue corresponding to position 516 in SEQ ID NO: 14; the amino acid L at a residue corresponding to position 524 in SEQ ID NO: 14; the amino acid D at a residue corresponding to position 528 in SEQ ID NO: 14; the amino acid L or R at a residue corresponding to position 542 in SEQ ID NO: 14; the amino acid R at a residue corresponding to position 543 in SEQ ID NO: 14; and/or the amino acid R at a residue corresponding to position 544 in SEQ ID NO: 14.

[0072] In some embodiments, the TS comprises relative to SEQ ID NO: 14: Q58S, V288L, and F345L; R31Q, V52I, H56N, Q58S, M61S, I74T, N90V, A250P, S255V, F345L, Q475K, and T492N; R31Q, H56N, I74T, N90V, H143E, A250P, S255V, Q475K, and T492N; R31Q, H56N, I74T, N90V, A250P, S255V, L443I, Q475K, and T492N; H56N, M61S, N90V, A250D, S255V, V288L, Q475K, T492N, and A495E; R31Q, H56N, I74T, N90V, K215R, A250P, S255V, Q475K, and T492N; R31Q, P49A, H56N, Q58S, M61S, I74T, N90V, H143E, A250P, S255V, V288L, F345L, Q475K, and T492N; R31Q, A47T, H56N, I74T, N90V, A250P, S255V, Q475K, and T492N; M61 S, N90V, A250D, S255V, Q475K, T492N, A495E, and N498T; R31Q, H56N, M61S, I74T, N89H, N90V, S100A, H136R, E150Q, N196K, N211D, A250P, S255V, V288M, F345M, S382K, L443I, Q475K, and T492N; R31Q, H56N, Q58S, M61S, I74T, N90V, H143E, A250P, S255V, V288L, T340E, F345L, E424D, Q475K, and T492N; R31Q, H56N, I74T, S88L, N90V, A250P, S255V, Q475K, and T492N; R31Q, V52I, H56N, Q58S, M61S, I74T, N90V, H143E, A250P, S255V, V288L, F345L, Q475K, and T492N; R31Q, H56N, Q58S, M61S, I74T, N90V, H143E, A250P, S255V, V288L, T340E, F345L, E424D, Q475K, and T492N; R31Q, H56N, Q58S, M61S, 174T, N90V, H143E, A250P, S255V, V288L, F345L, A411V, Q475K, and T492N; R31Q, V52I, H56N, Q58S, M61S, 174T, N90V, A250P, S255V, V288L, F345L, Q475K, and T492N; R31Q, K50L, H56N, 174T, N90V, A250P, S255V, Q475K, and T492N; R31Q, A47T, V52I, H56N, Q58S, M61S, I74T, N90V, H143E, A250P, S255V, V288L, T340E, F345L, Q475K, and T492N; or R31Q, H56N, M61S, I74T, N89H, N90V, S100A, N196K, N211D, A250P, S255V, I257R, V288M, F345M, S382K, L443I, Q475K, and T492N.

[0073] In some embodiments, the TS comprises a sequence that is at least 90%, at least 95% at least 97%, at least 98%, at least 99% identical or is 100% identical to any one of SEQ ID NOs: 137-140, 142-143, 145-150, 154, 157, 159, 161, 162, 164, 167, 169, 173, 174, 177-193, 195, 196, 199, 204-206, 464-466, 488, 489, 492-498, 500, 502, 503, 506, 507-548, 550, 551, 552, 565, 574, 595, 597, 602, 698-882, and 993, or a conservatively substituted version thereof.

[0074] Further aspects of the disclosure relate to non-naturally occurring nucleic acids encoding a TS, wherein the non-naturally occurring nucleic acid comprises a sequence that is at least 90%, at least 95% at least 97%, at least 98%, or at least 99% identical to any one of SEQ ID NOs: 46-134, 194-222, 322-463, 954-1189, 1195-1197, 1201, 1202, and 1204. In some embodiments, the non-naturally occurring nucleic acid comprises the sequence of any one of SEQ ID NOs: 46-134, 194-222, 322-463, 954-1189, 1195-1197, 1201, 1202, and 1204, or a conservatively substituted version thereof.

[0075] Further aspects of the disclosure relate to vectors comprising non-naturally occurring nucleic acids associated with the disclosure.

[0076] Further aspects of the disclosure relate to expression cassettes comprising non-naturally occurring nucleic acids associated with the disclosure.

[0077] Further aspects of the disclosure relate to host cells transformed with non-naturally occurring nucleic acids, vectors, or expression cassettes associated with the disclosure.

[0078] Further aspects of the disclosure relate to bioreactors for producing a cannabinoid, wherein the bioreactor contains a CBG-type cannabinoid and a TS, wherein relative to the sequence of SEQ ID NO: 14, the TS comprises an amino acid substitution at one or more residues corresponding to positions 31, 36, 40, 41, 44, 46, 47, 49, 51, 52, 56, 58, 59, 61, 63, 74, 76, 85, 88, 89, 90, 95, 96, 100, 103, 116, 129, 136, 143, 150, 158, 173, 181, 196, 211, 237, 242, 247, 250, 255, 257, 267, 268, 273, 274, 288, 290, 296, 302, 309, 311, 318, 329, 340, 344, 345, 351, 354, 360, 361, 363, 377, 378, 379, 382, 396, 411, 417, 419, 424, 443, 446, 459, 462, 464, 469, 479, 475, 491, 492, 494, 495, 499, 528, 542, 543, and/or 544 in SEQ ID NO: 14, wherein the TS does not comprise the sequence of SEQ ID NO: 20, 21, 320 or 321.

[0079] Further aspects of the disclosure relate to bioreactors for producing a cannabinoid, wherein the bioreactor contains a CBG-type cannabinoid and a TS, wherein relative to the sequence of SEQ ID NO: 13, the TS comprises an amino acid substitution at one or more residues corresponding to positions 31, 47, 49, 50, 56, 57, 58, 69, 79, 89, 90, 95, 100, 103, 106, 116, 124, 143, 150, 162, 166, 167, 168, 171, 172,175, 180, 184, 196, 211, 213, 216, 230, 250, 263, 273, 283, 287, 290, 292, 319, 322, 339, 343, 344, 353, 376, 377, 378, 380, 386, 394, 397, 407, 410, 414, 415, 416, 418, 441, 442, 445, 446, 479, 450, 452, 454, 467, 481, 486, 490, 492, 504, 512, 527 and/or 542 in SEQ ID NO: 13.

[0080] Further aspects of the disclosure relate to bioreactors for producing a cannabinoid, wherein the bioreactor contains a CBG-type cannabinoid and a TS, wherein relative to the sequence of SEQ ID NO: 14, the TS comprises an amino acid substitution at one or more residues corresponding to positions 31, 40, 41, 46, 47, 49, 51, 52, 56, 58, 61, 63, 74, 90, 95, 96, 103, 116, 129, 136, 143, 158, 173, 181, 237, 242, 247, 255, 257, 268, 273, 288, 290, 296, 302, 309, 311, 318, 340, 344, 345, 351, 354, 360, 361, 363, 377, 378, 379, 382, 396, 411, 424, 425, 430, 442, 443, 446, 447, 459, 462, 464, 465, 469, 475, 479, 489, 491, 492, 493, 494, 495, 496, 516, 524, 528, 542, 543, and/or 544 in SEQ ID NO: 14, wherein the TS is capable of producing more of a CBC-type cannabinoid than a control TS, and wherein the control TS comprises the sequence of SEQ ID NO: 21.

[0081] Further aspects of the disclosure relate to bioreactors for producing a cannabinoid, wherein the bioreactor contains a CBG-type cannabinoid and any of the host cells associated with the disclosure.

[0082] Each of the limitations of the invention can encompass various embodiments of the invention. It is, therefore, anticipated that each of the limitations of the invention involving any one element or combinations of elements can be included in each aspect of the invention. This disclosure is not limited in its application to the details of construction and the arrangement of components set forth in the following description or illustrated in the drawings. The invention is capable of other embodiments and of being practiced or of being carried out in various ways. Also, the phraseology and terminology used in this application is for the purpose of description and should not be regarded as limiting. The use of “including,” “comprising,” or “having,” “containing,” “involving,” and variations thereof, is meant to encompass the items listed thereafter and equivalents thereof as well as additional items.

### BRIEF DESCRIPTION OF DRAWINGS

[0083] The accompanying drawings are not intended to be drawn to scale. In the drawings, each identical or nearly identical component that is illustrated in various figures is represented by a like numeral. For purposes of clarity, not every component may be labeled in every drawing. In the drawings:

[0084] FIG. 1 is a schematic depicting the native Cannabis biosynthetic pathway for production of cannabinoid compounds, including five enzymatic steps mediated by: (R1a) acyl activating enzymes (AAE); (R2a) olivetol synthase enzymes (OLS); (R3a) olivetolic acid cyclase enzymes (OAC); (R4a) cannabigerolic acid synthase enzymes (CBGAS); and (R5a) terminal synthase enzymes (TS). Formulae 1a-11a correspond to hexanoic acid (1a), hexanoyl-CoA (2a), malonyl-CoA (3a), 3,5,7-trioxododecanoyl-CoA (4a), olivetol (5a), olivetolic acid (6a), geranyl pyrophosphate (7a), cannabigerolic acid (8a), cannabidiolic acid (9a), tetrahydrocannabinolic acid (10a), and cannabichromenic acid (11a). Hexanoic acid is an exemplary carboxylic acid substrate; other carboxylic acids may also be used (e.g., butyric acid, isovaleric acid, octanoic acid, decanoic acid, etc.; see e.g., FIG. 3 below). The enzymes that catalyze the synthesis of 3,5,7-trioxododecanoyl-CoA and olivetolic acid are shown in R2a and R3a, respectively, and can include multi-functional enzymes that catalyze the synthesis of 3,5,7-trioxododecanoyl-CoA and olivetolic acid. The enzymes cannabidiolic acid synthase (CBDAS), tetrahydrocannabinolic acid synthase (THCAS), and cannabichromenic acid synthase (CBCAS) that catalyze the synthesis of cannabidiolic acid, tetrahydrocannabinolic acid, and cannabichromenic acid, respectively, are shown in step R5a. FIG. 1 is adapted from Carvalho et al. “Designing Microorganisms for Heterologous Biosynthesis of Cannabinoids” (2017) FEMS Yeast Research June 1; 17(4), which is incorporated by reference in its entirety.

[0085] FIG. 2 is a schematic depicting a heterologous biosynthetic pathway for production of cannabinoid compounds, including five enzymatic steps mediated by: (R1) acyl activating enzymes (AAE); (R2) polyketide synthase enzymes (PKS) or bifunctional polyketide synthase-polyketide cyclase enzymes (PKS-PKC); (R3) polyketide cyclase enzymes (PKC) or bifunctional PKS-PKC enzymes; (R4) prenyltransferase enzymes (PT); and (R5) terminal synthase enzymes (TS). Any carboxylic acid of varying chain lengths, structures (e.g., aliphatic, alicyclic, or aromatic) and functionalization (e.g., hydroxylic-, keto-, amino-, thiol-, aryl-, or alogeno-) may also be used as precursor substrates (e.g., thiopropionic acid, hydroxy phenyl acetic acid, norleucine, bromodecanoic acid, butyric acid, isovaleric acid, octanoic acid, decanoic acid, etc).

[0086] FIG. 3 is a non-exclusive representation of select putative precursors for the cannabinoid pathway in FIG. 2.

[0087] FIG. 4 is a schematic showing a reaction catalyzed by a TS enzyme wherein the geranyl moiety of cannabigerolic acid (Formula (8a)) is cyclized to yield cannabidiolic acid, tetrahydrocannabinolic acid, or cannabichromenic acid.

[0088] FIG. 5 is a schematic showing a plasmid bearing the transcriptional unit encoding a TS. The coding sequence for the candidate TS enzymes in the libraries (labeled “Terminal Synthase”) was driven by the GAL1 promoter. Each candidate TS enzyme possessed an N-terminally fused signal peptide (labeled “N-terminal signal peptide”) and a C-terminally fused signal peptide (labeled “C-terminal signal peptide”).

[0089] FIG. 6 depicts a graph showing tetrahydrocannabinolic acid (THCA) titers of THCAS enzymes fused with various N- and C-terminal signal peptides depicted on the X-axis. The strains included in FIG. 6, listed from left to right are: 631201 (containing signal peptide UBC6), 631191 (containing signal peptides YLR120C and HDEL), 631195 (containing signal peptides Osm1p and HDEL), 631199 (containing signal peptides Ost1 leader and HDEL), 631208 (containing signal peptide Ost1 leader), 631190 (containing signal peptides Mfa2 and HDEL), 631197 (containing signal peptides Sf leader and HDEL), 631188 (containing signal peptide HDEL), 631211 (containing signal peptide ERG11-leader), 631193 (containing signal peptides Mfa2 and HDEL), 631207 (containing signal peptide Mfa2), 631216 (containing signal peptide Mfa2), 631203 (containing signal peptide CVIA from Mfa), 631192 (containing signal peptides YLR120C and KLD), 631196 (containing signal peptides Osm1p and KLD), 631200 (containing signal peptides Ost1 leader and KLD), 631194 (containing signal peptides Mfa2 and KLD), 631198 (containing signal peptides Sf leader and KLD), 631212 (containing signal peptide Osm1), 631205 (containing signal peptide YNL121C), 631210 (containing signal peptide OSM1-leader-T23L), 631202 (containing signal peptide PTS1 SKL), 631206 (containing signal peptide YLR120C), 631215 (containing signal peptide PEP4 (long (2-76)), 631204 (containing signal peptide YDR456W), 631189 (containing signal peptide Komagataella phaffii PEP4), 631213 (containing signal peptide PRC1-11), 631214 (containing signal peptide PEP4 (short (1-24)), 631209 (containing signal peptide Sf leader), and 631185 (GFP negative control). Strain IDs and their corresponding activity from this graph are shown in Table 6.

[0090] FIG. 7 depicts a graph showing screening activity data of candidate TS enzymes identified in Example 2 for THCA production based on an in vivo activity assay in S. cerevisiae. Strain t616313, expressing GFP, was used as a negative control. The data show the plotting of four bioreplicates. Strain IDs and their corresponding activity from this graph are shown in Table 8.

[0091] FIG. 8 depicts a graph showing screening activity data of candidate TS enzymes identified in Example 2 for cannabidiolic acid (CBDA) production based on an in vivo activity assay in S. cerevisiae. Strain t616314, expressing a Cannabis CBDAS, was used as a positive control for determining hit ranking of the library members. Strain t616313, expressing GFP, was used as a negative control. The data show the plotting of four bioreplicates. Strain IDs and their corresponding activity from this graph are shown in Table 9.

[0092] FIG. 9 depicts a graph showing screening activity data of candidate TS enzymes identified in Example 2 for cannabichromenic acid (CBCA) production based on an in vivo activity assay in S. cerevisiae. Strain t616313, expressing GFP, was used as a negative control. The data show the plotting of four bioreplicates. Strain IDs and their corresponding activity from this graph are shown in Table 10.

[0093] FIG. 10 depicts a graph showing screening activity data of candidate TS enzymes identified in Example 3 for THCA production based on an in vivo activity assay in S. cerevisiae. Strain t701870, expressing a Cannabis THCAS, was used as a positive control and for determining hit ranking of the library members. Strain t616313, expressing GFP, was used as a negative control. The data show the plotting of two bioreplicates. Strain IDs and their corresponding activity from this graph are shown in Table 11.

[0094] FIG. 11 depicts a graph showing screening activity data of candidate TS enzymes identified in Example 3 for CBDA production based on an in vivo activity assay in S. cerevisiae. Strain t616314, expressing a Cannabis CBDAS, was used as a positive control for determining hit ranking of the library members. Strain t616313, expressing GFP, was used as a negative control. The data show the plotting of two bioreplicates. Strain IDs and their corresponding activity from this graph are shown in Table 12.

[0095] FIG. 12 depicts a graph showing screening activity data of candidate TS enzymes identified in Example 3 for CBCA production based on an in vivo activity assay in S. cerevisiae. Strain t616315, expressing a Cannabis THCAS, was used as a positive control and for determining hit ranking of the library members. Strain t616313, expressing GFP, was used as a negative control. The data show the plotting of two bioreplicates. Strain IDs and their corresponding activity from this graph are shown in Table 13.

[0096] FIGS. 13A-13C depict graphs showing screening activity data of candidate TS enzymes identified in Example 4 for THCA, CBDA, and CBCA production based on an in vivo activity assay in S. cerevisiae. Strain t807949, expressing a C. sativa THCAS, strain t820182, expressing a C. sativa THCAS, and strain t807973, expressing a C. sativa CBDAS, were used as positive controls and for determining hit ranking of the library members. Strain t807914, expression GFP, was used as a negative control. The data show the plotting of four bioreplicates. FIG. 13A depicts THCA production. FIG. 13B depicts CBDA production. FIG. 13C depicts CBCA production. Strains depicted in FIGS. 13A-13C and their corresponding activity are shown in Table 14.

[0097] FIGS. 14A-14C depict graphs showing screening activity data of candidate TS enzymes identified in Example 4 for THCVA, CBDVA, and CBCVA production based on an in vivo activity assay in S. cerevisiae. Strain t807949, expressing a C. sativa THCAS, strain t820182, expressing a C. sativa THCAS, and strain t807973, expressing a C. sativa CBDAS were used as positive controls and for determining hit ranking of the library members. Strain t807914, expression GFP, was used as a negative control. The data show the plotting of four bioreplicates. FIG. 14A depicts THCVA production. FIG. 14B depicts CBDVA production.

[0098] FIG. 14C depicts CBCVA production. Strains depicted in FIGS. 14A-14C and their corresponding activity are shown in Table 15.

[0099] FIG. 15 depicts a graph showing screening activity data of candidate TS enzymes identified in Example 5 for THCA production based on an in vivo activity assay in S. cerevisiae. Strain 876606, expressing a C. sativa THCAS, was used as a positive control for THCAS activity. Strain 865977, expressing a THCAS candidate from Example 4, was also used as a positive control for determining hit ranking of the library members. Strains engineered to produce THCA were normalized to the in-plate performance of strain 865977. Strains depicted in FIG. 15 and their corresponding activity are shown in Table 16.

[0100] FIG. 16 depicts a graph showing screening activity data of candidate TS enzymes identified in Example 5 for CBDA production based on an in vivo activity assay in S. cerevisiae. Strain 876607, expressing a C. sativa CBDAS, was used as a positive control for THCAS activity. Strain 865859, expressing a CBDAS candidate from Example 4, was also used as a positive control for determining hit ranking of the library members. Strains engineered to produce CBDA were normalized to the in-plate performance of strain 865859. Strains depicted in FIG. 16 and their corresponding activity are shown in Table 16.

[0101] FIG. 17 depicts a graph showing screening activity data of candidate TS enzymes identified in Example 5 for CBCA production based on an in vivo activity assay in S. cerevisiae. Strain 876607 expressing a C. sativa CBDAS, and strain 865977, expressing a THCAS candidate from Example 4, were used as controls. Strains depicted in FIG. 17 and their corresponding activity are shown in Table 16.

### DETAILED DESCRIPTION

[0102] This disclosure provides methods for production of cannabinoids and cannabinoid precursors from fatty acid substrates using genetically modified host cells. Methods include heterologous expression of a terminal synthase (TS), such as a tetrahydrocannabinolic acid synthase (THCAS), a cannabidiolic acid synthase (CBDAS), and/or a cannabichromenic acid synthase (CBCAS). The application describes TSs that can be functionally expressed in host cells such as S. cerevisiae. As demonstrated in the Examples, multiple THCAS, CBDAS and CBCAS enzymes were identified that were capable of producing tetrahydrocannabinolic acid (THCA), tetrahydrocannabivarin acid (THCVA), cannabidiolic acid (CBDA), cannabidivarinic acid (CBDVA), cannabichromenic acid (CBCA), and/or cannabichromevarinic acid (CBCVA) in a host cell. The TSs described in this disclosure may be useful in increasing the efficiency and purity of cannabinoid production, such as, for example, by altering the activity and/or abundance of such enzymes.

### Definitions

[0103] While the following terms are believed to be well understood by one of ordinary skill in the art, the following definitions are set forth to facilitate explanation of the disclosed subject matter.

[0104] The term “a” or “an” refers to one or more of an entity, i.e., can identify a referent as plural. Thus, the terms “a” or “an,” “one or more” and “at least one” are used interchangeably in this application. In addition, reference to “an element” by the indefinite article “a” or “an” does not exclude the possibility that more than one of the elements is present, unless the context clearly requires that there is one and only one of the elements.

[0105] The terms “microorganism” or “microbe” should be taken broadly. These terms are used interchangeably and include, but are not limited to, the two prokaryotic domains, Bacteria and Archaea, as well as certain eukaryotic fungi and protists. In some embodiments, the disclosure may refer to the “microorganisms” or “microbes” of lists/tables and figures present in the disclosure. This characterization can refer to not only the identified taxonomic genera of the tables and figures, but also the identified taxonomic species, as well as the various novel and newly identified or designed strains of any organism in the tables or figures. The same characterization holds true for the recitation of these terms in other parts of the specification, such as in the Examples.

[0106] The term “prokaryotes” is recognized in the art and refers to cells that contain no nucleus or other cell organelles. The prokaryotes are generally classified in one of two domains, the Bacteria and the Archaea.

[0107] “Bacteria” or “eubacteria” refers to a domain of prokaryotic organisms. Bacteria include at least 11 distinct groups as follows: (1) Gram-positive (gram+) bacteria, of which there are two major subdivisions: (a) high G+C group (Actinomycetes, Mycobacteria, Micrococcus, others) and (b) low G+C group (Bacillus, Clostridia, Lactobacillus, Staphylococci, Streptococci, Mycoplasmas); (2) Proteobacteria, e.g., Purple photosynthetic+non-photosynthetic Gram-negative bacteria (includes most “common” Gram-negative bacteria); (3) Cyanobacteria, e.g., oxygenic phototrophs; (4) Spirochetes and related species; (5) Planctomyces; (6) Bacteroides, Flavobacteria; (7) Chlamydia; (8) Green sulfur bacteria; (9) Green non-sulfur bacteria (also anaerobic phototrophs); (10) Radioresistant micrococci and relatives; and (11) Thermotoga and Thermosipho thermophiles.

[0108] The term “Archaea” refers to a taxonomic classification of prokaryotic organisms with certain properties that make them distinct from Bacteria in physiology and phylogeny.

[0109] The term “Cannabis” refers to a genus in the family Cannabaceae. Cannabis is a dioecious plant. Glandular structures located on female flowers of Cannabis, called trichomes, accumulate relatively high amounts of a class of terpeno-phenolic compounds known as phytocannabinoids (described in further detail below). Cannabis has conventionally been cultivated for production of fibre and seed (commonly referred to as “hemp-type”), or for production of intoxicants (commonly referred to as “drug-type”). In drug-type Cannabis, the trichomes contain relatively high amounts of tetrahydrocannabinolic acid (THCA), which can convert to tetrahydrocannabinol (THC) via a decarboxylation reaction, for example upon combustion of dried Cannabis flowers, to provide an intoxicating effect. Drug-type Cannabis often contains other cannabinoids in lesser amounts. In contrast, hemp-type Cannabis contains relatively low concentrations of THCA, often less than 0.3% THC by dry weight. Hemp-type Cannabis may contain non-THC and non-THCA cannabinoids, such as cannabidiolic acid (CBDA), cannabidiol (CBD), and other cannabinoids. Presently, there is a lack of consensus regarding the taxonomic organization of the species within the genus. Unless context dictates otherwise, the term “Cannabis” is intended to include all putative species within the genus, such as, without limitation, Cannabis sativa, Cannabis indica, and Cannabis ruderalis and without regard to whether the Cannabis is hemp-type or drug-type.

[0110] The term “cyclase activity” in reference to a polyketide synthase (PKS) enzyme (e.g., an olivetol synthase (OLS) enzyme) or a polyketide cyclase (PKC) enzyme (e.g., an olivetolic acid cyclase (OAC) enzyme), refers to the activity of catalyzing the cyclization of an oxo fatty acyl-CoA (e.g., 3,5,7-trioxododecanoyl-COA, 3,5,7-trioxodecanoyl-COA) to the corresponding intramolecular cyclization product (e.g., olivetolic acid, divarinic acid). In some embodiments, the PKS or PKC catalyzes the C2-C7 aldol condensation of an acyl-COA with three additional ketide moieties added thereto.

[0111] A “cytosolic” or “soluble” enzyme refers to an enzyme that is predominantly localized (or predicted to be localized) in the cytosol of a host cell.

[0112] A “eukaryote” is any organism whose cells contain a nucleus and other organelles enclosed within membranes. Eukaryotes belong to the taxon Eukarya or Eukaryota. The defining feature that sets eukaryotic cells apart from prokaryotic cells (i.e., bacteria and archaea) is that they have membrane-bound organelles, especially the nucleus, which contains the genetic material, and is enclosed by the nuclear envelope.

[0113] The term “host cell” refers to a cell that can be used to express a polynucleotide, such as a polynucleotide that encodes an enzyme used in biosynthesis of cannabinoids or cannabinoid precursors. The terms “genetically modified host cell,” “recombinant host cell,” and “recombinant strain” are used interchangeably and refer to host cells that have been genetically modified by, e.g., cloning and transformation methods, or by other methods known in the art (e.g., selective editing methods, such as CRISPR). Thus, the terms include a host cell (e.g., bacterial cell, yeast cell, fungal cell, insect cell, plant cell, mammalian cell, human cell, etc.) that has been genetically altered, modified, or engineered, so that it exhibits an altered, modified, or different genotype and/or phenotype, as compared to the naturally-occurring cell from which it was derived. It is understood that in some embodiments, the terms refer not only to the particular recombinant host cell in question, but also to the progeny or potential progeny of such a host cell.

[0114] The term “control host cell,” or the term “control” when used in relation to a host cell, refers to an appropriate comparator host cell for determining the effect of a genetic modification or experimental treatment. In some embodiments, the control host cell is a wild type cell. In other embodiments, a control host cell is genetically identical to the genetically modified host cell, except for the genetic modification(s) differentiating the genetically modified or experimental treatment host cell. In some embodiments, the control host cell has been genetically modified to express a wild type or otherwise known variant of an enzyme being tested for activity in other test host cells.

[0115] The term “heterologous” with respect to a polynucleotide, such as a polynucleotide comprising a gene, is used interchangeably with the term “exogenous” and the term “recombinant” and refers to: a polynucleotide that has been artificially supplied to a biological system; a polynucleotide that has been modified within a biological system, or a polynucleotide whose expression or regulation has been manipulated within a biological system. A heterologous polynucleotide that is introduced into or expressed in a host cell may be a polynucleotide that comes from a different organism or species from the host cell, or may be a synthetic polynucleotide, or may be a polynucleotide that is also endogenously expressed in the same organism or species as the host cell. For example, a polynucleotide that is endogenously expressed in a host cell may be considered heterologous when it is situated non-naturally in the host cell; expressed recombinantly in the host cell, either stably or transiently; modified within the host cell; selectively edited within the host cell; expressed in a copy number that differs from the naturally occurring copy number within the host cell; or expressed in a non-natural way within the host cell, such as by manipulating regulatory regions that control expression of the polynucleotide. In some embodiments, a heterologous polynucleotide is a polynucleotide that is endogenously expressed in a host cell but whose expression is driven by a promoter that does not naturally regulate expression of the polynucleotide. In other embodiments, a heterologous polynucleotide is a polynucleotide that is endogenously expressed in a host cell and whose expression is driven by a promoter that does naturally regulate expression of the polynucleotide, but the promoter or another regulatory region is modified. In some embodiments, the promoter is recombinantly activated or repressed. For example, gene-editing based techniques may be used to regulate expression of a polynucleotide, including an endogenous polynucleotide, from a promoter, including an endogenous promoter. See, e.g., Chavez el al., Nat Methods. 2016 July; 13(7). 563-567. A heterologous polynucleotide may comprise a wild-type sequence or a mutant sequence as compared with a reference polynucleotide sequence.

[0116] The term “at least a portion” or “at least a fragment” of a nucleic acid or polypeptide means a portion having the minimal size characteristics of such sequences, or any larger fragment of the full length molecule, up to and including the full length molecule. A fragment of a polynucleotide of the disclosure may encode a biologically active portion of an enzyme, such as a catalytic domain. A biologically active portion of a genetic regulatory element may comprise a portion or fragment of a full length genetic regulatory element and have the same type of activity as the full length genetic regulatory element, although the level of activity of the biologically active portion of the genetic regulatory element may vary compared to the level of activity of the full length genetic regulatory element.

[0117] A coding sequence and a regulatory sequence are said to be “operably joined” or “operably linked” when the coding sequence and the regulatory sequence are covalently linked and the expression or transcription of the coding sequence is under the influence or control of the regulatory sequence. If the coding sequence is to be translated into a functional protein, the coding sequence and the regulatory sequence are said to be operably joined if induction of a promoter in the 5′ regulatory sequence promotes transcription of the coding sequence and if the nature of the linkage between the coding sequence and the regulatory sequence does not (1) result in the introduction of a frame-shift mutation, (2) interfere with the ability of the promoter region to direct the transcription of the coding sequence, or (3) interfere with the ability of the corresponding RNA transcript to be translated into a protein.

[0118] The terms “link,” “linked,” or “linkage” means two entities (e.g., two polynucleotides or two proteins) are bound to one another by any physicochemical means. Any linkage known to those of ordinary skill in the art, covalent or non-covalent, is embraced. In some embodiments, a nucleic acid sequence encoding an enzyme of the disclosure is linked to a nucleic acid encoding a signal peptide. In some embodiments, an enzyme of the disclosure is linked to a signal peptide. Linkage can be direct or indirect.

[0119] The terms “transformed” or “transform” with respect to a host cell refer to a host cell in which one or more nucleic acids have been introduced, for example on a plasmid or vector or by integration into the genome. In some instances where one or more nucleic acids are introduced into a host cell on a plasmid or vector, one or more of the nucleic acids, or fragments thereof, may be retained in the cell, such as by integration into the genome of the cell, while the plasmid or vector itself may be removed from the cell. In such instances, the host cell is considered to be transformed with the nucleic acids that were introduced into the cell regardless of whether the plasmid or vector is retained in the cell or not.

[0120] The term “volumetric productivity” or “production rate” refers to the amount of product formed per volume of medium per unit of time. Volumetric productivity can be reported in gram per liter per hour (g/L/h).

[0121] The term “specific productivity” of a product refers to the rate of formation of the product normalized by unit volume or mass or biomass and has the physical dimension of a quantity of substance per unit time per unit mass or volume [M·T⁻¹·M⁻¹ or M·T⁻¹·L⁻³, where M is mass or moles, T is time, L is length].

[0122] The term “biomass specific productivity” refers to the specific productivity in gram product per gram of cell dry weight (CDW) per hour (g/g CDW/h) or in mmol of product per gram of cell dry weight (CDW) per hour (mmol/g CDW/h). Using the relation of CDW to OD600 for the given microorganism, specific productivity can also be expressed as gram product per liter culture medium per optical density of the culture broth at 600 nm (OD) per hour (g/L/h/OD). Also, if the elemental composition of the biomass is known, biomass specific productivity can be expressed in mmol of product per C-mole (carbon mole) of biomass per hour (mmol/C-mol/h).

[0123] The term “yield” refers to the amount of product obtained per unit weight of a certain substrate and may be expressed as g product per g substrate (g/g) or moles of product per mole of substrate (mol/mol). Yield may also be expressed as a percentage of the theoretical yield. “Theoretical yield” is defined as the maximum amount of product that can be generated per a given amount of substrate as dictated by the stoichiometry of the metabolic pathway used to make the product and may be expressed as g product per g substrate (g/g) or moles of product per mole of substrate (mol/mol).

[0124] The term “titer” refers to the strength of a solution or the concentration of a substance in solution. For example, the titer of a product of interest (e.g., small molecule, peptide, synthetic compound, fuel, alcohol, etc.) in a fermentation broth is described as g of product of interest in solution per liter of fermentation broth or cell-free broth (g/L) or as g of product of interest in solution per kg of fermentation broth or cell-free broth (g/Kg).

[0125] The term “total titer” refers to the sum of all products of interest produced in a process, including but not limited to the products of interest in solution, the products of interest in gas phase if applicable, and any products of interest removed from the process and recovered relative to the initial volume in the process or the operating volume in the process. For example, the total titer of products of interest (e.g., small molecule, peptide, synthetic compound, fuel, alcohol, etc.) in a fermentation broth is described as g of products of interest in solution per liter of fermentation broth or cell-free broth (g/L) or as g of products of interest in solution per kg of fermentation broth or cell-free broth (g/Kg).

[0126] The term “amino acid” refers to organic compounds that comprise an amino group, —NH2, and a carboxyl group, —COOH. The term “amino acid” includes both naturally occurring and unnatural amino acids. Nomenclature for the twenty common amino acids is as follows: alanine (ala or A); arginine (arg or R); asparagine (asn or N); aspartic acid (asp or D); cysteine (cys or C); glutamine (gln or Q); glutamic acid (glu or E); glycine (gly or G); histidine (his or H); isoleucine (ile or I); leucine (leu or L); lysine (lys or K); methionine (met or M); phenylalanine (phe or F); proline (pro or P); serine (ser or S); threonine (thr or T); tryptophan (trp or W); tyrosine (tyr or Y); and valine (val or V). Non-limiting examples of unnatural amino acids include homo-amino acids, proline and pyruvic acid derivatives, 3-substituted alanine derivatives, glycine derivatives, ring-substituted phenylalanine derivatives, ring-substituted tyrosine derivatives, linear core amino acids, amino acids with protecting groups including Fmoc, Boc, and Cbz, β-amino acids (β3 and β2), and N-methyl amino acids.

[0127] The term “aliphatic” refers to alkyl, alkenyl, alkynyl, and carbocyclic groups. Likewise, the term “heteroaliphatic” refers to heteroalkyl, heteroalkenyl, heteroalkynyl, and heterocyclic groups.

[0128] The term “alkyl” refers to a radical of, or a substituent that is, a straight-chain or branched saturated hydrocarbon group having from 1 to 20 carbon atoms (“C1-20 alkyl”). In certain embodiments, the term “alkyl” refers to a radical of, or a substituent that is, a straight-chain or branched saturated hydrocarbon group having from 1 to 10 carbon atoms (“C₁₋₁₀ alkyl”). In some embodiments, an alkyl group has 1 to 9 carbon atoms (“C₁₋₉ alkyl”). In some embodiments, an alkyl group has 1 to 8 carbon atoms (“C₁₋₈ alkyl”). In some embodiments, an alkyl group has 1 to 7 carbon atoms (“C₁₋₇ alkyl”). In some embodiments, an alkyl group has 2 to 7 carbon atoms (“C2-7 alkyl”). In some embodiments, an alkyl group has 3 to 7 carbon atoms (“C3-7 alkyl”). In some embodiments, an alkyl group has 1 to 6 carbon atoms (“C₁₋₆ alkyl”). In some embodiments, an alkyl group has 2 to 6 carbon atoms (“C₂₋₆ alkyl”). In some embodiments, an alkyl group has 3 to 5 carbon atoms (“C₃₋₅ alkyl”). In some embodiments, an alkyl group has 5 carbon atoms (“C₅ alkyl”). In some embodiments, the alkyl group has 3 carbon atoms (“C3 alkyl”). In some embodiments, the alkyl group has 7 carbon atoms (“C7 alkyl”). In some embodiments, an alkyl group has 1 to 5 carbon atoms (“C₁₋₅ alkyl”). In some embodiments, an alkyl group has 1 to 4 carbon atoms (“C₁₋₄ alkyl”). In some embodiments, an alkyl group has 1 to 3 carbon atoms (“C₁₋₃ alkyl”). In some embodiments, an alkyl group has 1 to 2 carbon atoms (“C₁₋₂ alkyl”). In some embodiments, an alkyl group has 1 carbon atom (“C₁ alkyl”).

[0129] Examples of C₁₋₆ alkyl groups include methyl (C₁), ethyl (C₂), propyl (C₃) (e.g., n-propyl, isopropyl), butyl (C₄)(e.g., n-butyl, tert-butyl, sec-butyl, iso-butyl), pentyl (C₅)(e.g., n-pentyl, 3-pentanyl, amyl, neopentyl, 3-methyl-2-butanyl, tertiary amyl), and hexyl (C₆) (e.g., n-hexyl). Additional examples of alkyl groups include n-heptyl (C₇), n-octyl (C₈), and the like. Unless otherwise specified, each instance of an alkyl group is independently unsubstituted (an “unsubstituted alkyl”) or substituted (a “substituted alkyl”) with one or more substituents (e.g., halogen, such as F). In certain embodiments, the alkyl group is an unsubstituted C₁₋₁₀ alkyl (such as unsubstituted C₁₋₆ alkyl, e.g., —CH₃ (Me), unsubstituted ethyl (Et), unsubstituted propyl (Pr, e.g., unsubstituted n-propyl (n-Pr), unsubstituted isopropyl (i-Pr)), unsubstituted butyl (Bu, e.g., unsubstituted n-butyl (n-Bu), unsubstituted tert-butyl (tert-Bu or t-Bu), unsubstituted sec-butyl (sec-Bu), unsubstituted isobutyl (i-Bu)). In certain embodiments, the alkyl group is a substituted C₁₋₁₀ alkyl (such as substituted C₁₋₆ alkyl, e.g., —CF₃, benzyl).

[0130] The term “acyl” refers to a group having the general formula —C(═O)R^{X1}, —C(═O)OR^{X1}, —C(═O)—O—C(═O)R^{X1}, —C(═O)SR^{X1}, —C(═O)N(R^{X1})₂, —C(═S)R^{X1}, —C(═S)N(R^{X1})₂, and —C(═S)S(R^{X1}), —C(═NR^{X1})R^{X1}, —C(═NR^{X1})OR^{X1}, —C(═NR^{X1})SR^{X1}, and —C(═NR^{X1})N(R^{X1})₂, wherein R^{X1} is hydrogen; halogen; substituted or unsubstituted hydroxyl; substituted or unsubstituted thiol; substituted or unsubstituted amino; substituted or unsubstituted acyl, cyclic or acyclic, substituted or unsubstituted, branched or unbranched aliphatic; cyclic or acyclic, substituted or unsubstituted, branched or unbranched heteroaliphatic; cyclic or acyclic, substituted or unsubstituted, branched or unbranched alkyl; cyclic or acyclic, substituted or unsubstituted, branched or unbranched alkenyl; substituted or unsubstituted alkynyl; substituted or unsubstituted aryl, substituted or unsubstituted heteroaryl, aliphaticoxy, heteroaliphaticoxy, alkyloxy, heteroalkyloxy, aryloxy, heteroaryloxy, aliphaticthioxy, heteroaliphaticthioxy, alkylthioxy, heteroalkylthioxy, arylthioxy, heteroarylthioxy, mono- or di-aliphaticamino, mono- or di-heteroaliphaticamino, mono- or di-alkylamino, mono- or di-heteroalkylamino, mono- or di-arylamino, or mono- or di-heteroarylamino; or two R^{X1} groups taken together form a 5- to 6-membered heterocyclic ring. Exemplary acyl groups include aldehydes (—CHO), carboxylic acids (—CO₂H), ketones, acyl halides, esters, amides, imines, carbonates, carbamates, and ureas. Acyl substituents include, but are not limited to, any of the substituents described in this application that result in the formation of a stable moiety (e.g., aliphatic, alkyl, alkenyl, alkynyl, heteroaliphatic, heterocyclic, aryl, heteroaryl, acyl, oxo, imino, thiooxo, cyano, isocyano, amino, azido, nitro, hydroxyl, thiol, halo, aliphaticamino, heteroaliphaticamino, alkylamino, heteroalkylamino, arylamino, heteroarylamino, alkylaryl, arylalkyl, aliphaticoxy, heteroaliphaticoxy, alkyloxy, heteroalkyloxy, aryloxy, heteroaryloxy, aliphaticthioxy, heteroaliphaticthioxy, alkylthioxy, heteroalkylthioxy, arylthioxy, heteroarylthioxy, acyloxy, and the like, each of which may or may not be further substituted).

[0131] “Alkenyl” refers to a radical of, or a substituent that is, a straight-chain or branched hydrocarbon group having from 2 to 20 carbon atoms, one or more carbon-carbon double bonds, and no triple bonds (“C₂₋₂₀ alkenyl”). In some embodiments, an alkenyl group has 2 to 10 carbon atoms (“C₂₋₁₀ alkenyl”). In some embodiments, an alkenyl group has 2 to 9 carbon atoms (“C₂₋₉ alkenyl”). In some embodiments, an alkenyl group has 2 to 8 carbon atoms (“C₂₋₈ alkenyl”). In some embodiments, an alkenyl group has 2 to 7 carbon atoms (“C₂₋₇ alkenyl”). In some embodiments, an alkenyl group has 2 to 6 carbon atoms (“C₂₋₆ alkenyl”). In some embodiments, an alkenyl group has 2 to 5 carbon atoms (“C₂₋₅ alkenyl”). In some embodiments, an alkenyl group has 2 to 4 carbon atoms (“C₂₋₄ alkenyl”). In some embodiments, an alkenyl group has 2 to 3 carbon atoms (“C₂₋₃ alkenyl”). In some embodiments, an alkenyl group has 2 carbon atoms (“C₂ alkenyl”). The one or more carbon-carbon double bonds can be internal (such as in 2-butenyl) or terminal (such as in 1-butenyl). Examples of C₂₋₄ alkenyl groups include ethenyl (C₂), 1-propenyl (C₃), 2-propenyl (C₃), 1-butenyl (C₄), 2-butenyl (C₄), butadienyl (C₄), and the like. Examples of C₂₋₄ alkenyl groups include the aforementioned C₂₋₄ alkenyl groups as well as pentenyl (C₅), pentadienyl (C₅), hexenyl (C₆), and the like. Additional examples of alkenyl include heptenyl (C₇), octenyl (C₈), octatrienyl (C₈), and the like. Unless otherwise specified, each instance of an alkenyl group is independently optionally substituted, i.e., unsubstituted (an “unsubstituted alkenyl”) or substituted (a “substituted alkenyl”) with one or more substituents. In certain embodiments, the alkenyl group is unsubstituted C₂₋₁₀ alkenyl. In certain embodiments, the alkenyl group is substituted C₂₋₁₀ alkenyl.

[0132] “Alkynyl” refers to a radical of, or a substituent that is, a straight-chain or branched hydrocarbon group having from 2 to 20 carbon atoms, one or more carbon-carbon triple bonds, and optionally one or more double bonds (“C₂₋₂₀ alkynyl”). In some embodiments, an alkynyl group has 2 to 10 carbon atoms (“C₂₋₁₀ alkynyl”). In some embodiments, an alkynyl group has 2 to 9 carbon atoms (“C₂₋₉ alkynyl”). In some embodiments, an alkynyl group has 2 to 8 carbon atoms (“C₂₋₈ alkynyl”). In some embodiments, an alkynyl group has 2 to 7 carbon atoms (“C₂₋₇ alkynyl”). In some embodiments, an alkynyl group has 2 to 6 carbon atoms (“C₂₋₆ alkynyl”). In some embodiments, an alkynyl group has 2 to 5 carbon atoms (“C₂₋₅ alkynyl”). In some embodiments, an alkynyl group has 2 to 4 carbon atoms (“C₂₋₄ alkynyl”). In some embodiments, an alkynyl group has 2 to 3 carbon atoms (“C₂₋₃ alkynyl”). In some embodiments, an alkynyl group has 2 carbon atoms (“C₂ alkynyl”). The one or more carbon-carbon triple bonds can be internal (such as in 2-butynyl) or terminal (such as in 1-butynyl). Examples of C₂₋₄ alkynyl groups include, without limitation, ethynyl (C₂), 1-propynyl (C₃), 2-propynyl (C₃), 1-butynyl (C₄), 2-butynyl (C₄), and the like. Examples of C₂₋₆ alkenyl groups include the aforementioned C₂₋₄ alkynyl groups as well as pentynyl (C₅), hexynyl (C₆), and the like. Additional examples of alkynyl include heptynyl (C₇), octynyl (C₈), and the like. Unless otherwise specified, each instance of an alkynyl group is independently optionally substituted, i.e., unsubstituted (an “unsubstituted alkynyl”) or substituted (a “substituted alkynyl”) with one or more substituents. In certain embodiments, the alkynyl group is unsubstituted C₂₋₁₀ alkynyl. In certain embodiments, the alkynyl group is substituted C₂₋₁₀ alkynyl.

[0133] “Carbocyclyl” or “carbocyclic” refers to a radical of a non-aromatic cyclic hydrocarbon group having from 3 to 10 ring carbon atoms (“C₃₋₁₀ carbocyclyl”) and zero heteroatoms in the non-aromatic ring system. In some embodiments, a carbocyclyl group has 3 to 8 ring carbon atoms (“C₃₋₈ carbocyclyl”). In some embodiments, a carbocyclyl group has 3 to 6 ring carbon atoms (“C₃₋₆ carbocyclyl”). In some embodiments, a carbocyclyl group has 3 to 6 ring carbon atoms (“C₃₋₆ carbocyclyl”). In some embodiments, a carbocyclyl group has 5 to 10 ring carbon atoms (“C₅₋₁₀ carbocyclyl”). Exemplary C₃₋₆ carbocyclyl groups include, without limitation, cyclopropyl (C₃), cyclopropenyl (C₃), cyclobutyl (C₄), cyclobutenyl (C₄), cyclopentyl (C₅), cyclopentenyl (C₅), cyclohexyl (C₆), cyclohexenyl (C₆), cyclohexadienyl (C₆), and the like. Exemplary C₃₋₈ carbocyclyl groups include, without limitation, the aforementioned C₃₋₆ carbocyclyl groups as well as cycloheptyl (C₇), cycloheptenyl (C₇), cycloheptadienyl (C₇), cycloheptatrienyl (C₇), cyclooctyl (C₈), cyclooctenyl (C₈), bicyclo[2.2.1]heptanyl (C₇), bicyclo[2.2.2]octanyl (C₈), and the like. Exemplary C₃₋₁₀ carbocyclyl groups include, without limitation, the aforementioned C₃₋₈ carbocyclyl groups as well as cyclononyl (C₉), cyclononenyl (C₉), cyclodecyl (C₁₀), cyclodecenyl (C₁₀), octahydro-1H-indenyl (C₉), decahydronaphthalenyl (C₁₀), spiro[4.5]decanyl (C₁₀), and the like. As the foregoing examples illustrate, in certain embodiments, the carbocyclyl group is either monocyclic (“monocyclic carbocyclyl”) or contain a fused, bridged or spiro ring system such as a bicyclic system (“bicyclic carbocyclyl”) and can be saturated or can be partially unsaturated. “Carbocyclyl” also includes ring systems wherein the carbocyclic ring, as defined above, is fused with one or more aryl or heteroaryl groups wherein the point of attachment is on the carbocyclic ring, and in such instances, the number of carbons continue to designate the number of carbons in the carbocyclic ring system. Unless otherwise specified, each instance of a carbocyclyl group is independently optionally substituted, i.e., unsubstituted (an “unsubstituted carbocyclyl”) or substituted (a “substituted carbocyclyl”) with one or more substituents. In certain embodiments, the carbocyclyl group is unsubstituted C₃₋₁₀ carbocyclyl. In certain embodiments, the carbocyclyl group is a substituted C₃₋₁₀ carbocyclyl.

[0134] In some embodiments, “carbocyclyl” is a monocyclic, saturated carbocyclyl group having from 3 to 10 ring carbon atoms (“C₃₋₁₀ cycloalkyl”). In some embodiments, a cycloalkyl group has 3 to 8 ring carbon atoms (“C₃₋₈ cycloalkyl”). In some embodiments, a cycloalkyl group has 3 to 6 ring carbon atoms (“C₃₋₆ cycloalkyl”). In some embodiments, a cycloalkyl group has 5 to 6 ring carbon atoms (“C₅₋₆ cycloalkyl”). In some embodiments, a cycloalkyl group has 5 to 10 ring carbon atoms (“C₅₋₁₀ cycloalkyl”). Examples of C₅₋₆ cycloalkyl groups include cyclopentyl (C₅) and cyclohexyl (C₅). Examples of C₃₋₆ cycloalkyl groups include the aforementioned C₅₋₆ cycloalkyl groups as well as cyclopropyl (C₃) and cyclobutyl (C₄). Examples of C₃₋₈ cycloalkyl groups include the aforementioned C₃₋₆ cycloalkyl groups as well as cycloheptyl (C₇) and cyclooctyl (C₈). Unless otherwise specified, each instance of a cycloalkyl group is independently unsubstituted (an “unsubstituted cycloalkyl”) or substituted (a “substituted cycloalkyl”) with one or more substituents. In certain embodiments, the cycloalkyl group is unsubstituted C₃₋₁₀ cycloalkyl. In certain embodiments, the cycloalkyl group is substituted C₃₋₁₀ cycloalkyl.

[0135] “Aryl” refers to a radical of a monocyclic or polycyclic (e.g., bicyclic or tricyclic) 4n+2 aromatic ring system (e.g., having 6, 10, or 14 pi electrons shared in a cyclic array) having 6-14 ring carbon atoms and zero heteroatoms provided in the aromatic ring system (“C₆₋₁₄ aryl”). In some embodiments, an aryl group has six ring carbon atoms (“C₆ aryl”; e.g., phenyl). In some embodiments, an aryl group has ten ring carbon atoms (“C₁₀ aryl”; e.g., naphthyl such as 1-naphthyl and 2-naphthyl). In some embodiments, an aryl group has fourteen ring carbon atoms (“C₁₄ aryl”; e.g., anthracyl). “Aryl” also includes ring systems wherein the aryl ring, as defined above, is fused with one or more carbocyclyl or heterocyclyl groups wherein the radical or point of attachment is on the aryl ring, and in such instances, the number of carbon atoms continue to designate the number of carbon atoms in the aryl ring system. Unless otherwise specified, each instance of an aryl group is independently optionally substituted, i.e., unsubstituted (an “unsubstituted aryl”) or substituted (a “substituted aryl”) with one or more substituents. In certain embodiments, the aryl group is unsubstituted C₆₋₁₄ aryl. In certain embodiments, the aryl group is substituted C₆₋₁₄ aryl.

[0136] “Aralkyl” is a subset of alkyl and aryl and refers to an optionally substituted alkyl group substituted by an optionally substituted aryl group. In certain embodiments, the aralkyl is optionally substituted benzyl. In certain embodiments, the aralkyl is benzyl. In certain embodiments, the aralkyl is optionally substituted phenethyl. In certain embodiments, the aralkyl is phenethyl. In certain embodiments, the aralkyl is 7-phenylheptanyl. In certain embodiments, the aralkyl is C7 alkyl substituted by an optionally substituted aryl group (e.g., phenyl). In certain embodiments, the aralkyl is a C7-C10 alkyl group substituted by an optionally substituted aryl group (e.g., phenyl).

[0137] “Partially unsaturated” refers to a group that includes at least one double or triple bond. A “partially unsaturated” ring system is further intended to encompass rings having multiple sites of unsaturation but is not intended to include aromatic groups (e.g., aryl or heteroaryl groups) as defined in this application. Likewise, “saturated” refers to a group that does not contain a double or triple bond, i.e., contains all single bonds.

[0138] The term “optionally substituted” means substituted or unsubstituted.

[0139] Alkyl, alkenyl, alkynyl, carbocyclyl, heterocyclyl, aryl, and heteroaryl groups are optionally substituted (e.g., “substituted” or “unsubstituted” alkyl, “substituted” or “unsubstituted” alkenyl, “substituted” or “unsubstituted” alkynyl, “substituted” or “unsubstituted” carbocyclyl, “substituted” or “unsubstituted” heterocyclyl, “substituted” or “unsubstituted” aryl or “substituted” or “unsubstituted” heteroaryl group). In general, the term “substituted,” whether preceded by the term “optionally” or not, means that at least one hydrogen present on a group (e.g., a carbon or nitrogen atom) is replaced with a permissible substituent, e.g., a substituent which upon substitution results in a stable compound, e.g., a compound which does not spontaneously undergo transformation such as by rearrangement, cyclization, elimination, or other reaction. Unless otherwise indicated, a “substituted” group has a substituent at one or more substitutable positions of the group, and when more than one position in any given structure is substituted, the substituent is either the same or different at each position. The term “substituted” is contemplated to include substitution with all permissible substituents of organic compounds, any of the substituents described in this application that results in the formation of a stable compound. The present invention contemplates any and all such combinations in order to arrive at a stable compound. For purposes of this invention, heteroatoms such as nitrogen may have hydrogen substituents and/or any suitable substituent as described in this application which satisfy the valencies of the heteroatoms and results in the formation of a stable moiety.

[0140] Exemplary carbon atom substituents include, but are not limited to, halogen, —CN, —NO₂, —N₃, —SO₂H, —SO₃H, —OH, —OR^{aa}, —ON(R^{bb})₂, —N(R^{bb})₂, —N(R^{bb})₃⁺X⁻, —N(OR^{cc})R^{bb}, —SH, —SR^{aa}, —SSR^{cc}, —C(═O)R^{aa}, —CO₂H, —CHO, —C(OR^{cc})₂, —CO₂R^{aa}, —OC(═O)R^{aa}, —OCO₂R^{aa}, —C(═O)N(R^{bb})₂, —OC(═O)N(R^{bb})₂, —NR^{bb}C(═O)R^{aa}, —NR^{bb}CO₂R^{aa}, —NRC(═O)N(R^{bb}), —C(═NR^{bb})R^{aa}, —C(═NR^{bb})OR^{aa}, —OC(═NR^{bb})R^{aa}, —OC(═NR^{bb})OR^{aa}, —C(═NR^{bb})N(R^{bb})₂, —OC(═NR^{bb})N(R^{bb})₂, —NR^{bb}C(═NR^{bb})N(R^{bb})₂, —C(═O)NR^{bb}SO₂R^{aa}, —NR^{bb}SO₂R^{aa}, —SO₂N(R^{bb})₂, —SO₂R^{aa}, —SO₂OR^{aa}, —OSO₂R^{aa}, —S(═O)R^{aa}, —OS(═O)R^{aa}, —Si(R^{aa})₃, —OSi(R^{aa})₃—C(═S)N(R^{bb})₂, —C(═O)SR^{aa}, —C(═S)SR^{aa}, —SC(═S)SR^{aa}, —SC(═O)SR^{aa}, —OC(═O)SR^{aa}, —SC(═O)OR^{aa}, —SC(═O)R^{aa}, —P(═O)(R^{aa})₂, —P(═O)(OR^{cc})₂, —OP(═O)(R^{aa})₂, —OP(═O)(OR^{cc})₂, —P(═O)(N(R^{bb})₂)₂, —OP(═O)(N(R^{bb})₂)₂, —NR^{bb}P(═O)(R^{aa})₂, —NR^{bb}P(═O)(OR^{cc})₂, —NR^{bb}P(═O)(N(R^{bb})₂)₂, —P(R^{cc})₂, —P(OR^{cc})₂, —P(R^{cc})₃⁺X⁻, —P(OR^{cc})₃⁺X⁻, —P(R^{cc})₄, —P(OR^{cc})₄, —OP(R^{cc})₂, —OP(R^{cc})₃⁺X⁻, —OP(OR^{cc})₂, —OP(OR^{cc})₃⁺X⁻, —OP(R^{cc})₄, —OP(OR^{cc})₄, —B(R^{aa})₂, —B(OR^{cc})₂, —BR^{aa}(OR^{cc}), C₁₋₁₀ alkyl, C₁₋₁₀ perhaloalkyl, C₂₋₁₀ alkenyl, C₂₋₁₀ alkynyl, heteroC₁₋₁₀ alkyl, heteroC₂₋₁₀ alkenyl, heteroC₂₋₁₀ alkynyl, C₃₋₁₀ carbocyclyl, 3-14 membered heterocyclyl, C₆₋₁₄ aryl, and 5-14 membered heteroaryl;

wherein;
[0141] each instance of R^{aa} is, independently, selected from C₁₋₁₀ alkyl, C₁₋₁₀ perhaloalkyl, C₂₋₁₀ alkenyl, C₂₋₁₀ alkynyl, heteroC₁₋₁₀ alkyl, heteroC₂₋₁₀alkenyl, heteroC₂₋₁₀alkynyl, C₃₋₁₀ carbocyclyl, 3-14 membered heterocyclyl, C₆₋₁₄ aryl, and 5-14 membered heteroaryl, or two R^{aa} groups are joined to form a 3-14 membered heterocyclyl or 5-14 membered heteroaryl ring, wherein each alkyl, alkenyl, alkynyl, heteroalkyl, heteroalkenyl, heteroalkynyl, carbocyclyl, heterocyclyl, aryl, and heteroaryl is independently substituted with 0, 1, 2, 3, 4, or 5 R groups;
[0142] each instance of R^{bb} is, independently, selected from hydrogen, —OH, —OR^{aa}, —N(R^{cc})₂, —CN, —C(═O)R^{aa}, —C(═O)N(R^{cc})₂, —CO₂R^{aa}, —SO₂R^{aa}, —C(═NR^{cc})OR^{aa}, —C(═NR^{cc})N(R^{cc})₂, —SO₂N(R^{cc})₂, —SO₂R^{cc}, —SO₂OR^{cc}, —SOR^{aa}, —C(═S)N(R^{cc})₂, —C(═O)SR^{cc}, —C(═S)SR^{cc}, —P(═O)(R^{aa})₂, —P(═O)(OR^{cc})₂, —P(═O)(N(R^{cc})₂)₂, C₁₋₁₀ alkyl, C₁₋₁₀ perhaloalkyl, C₂₋₁₀ alkenyl, C₂₋₁₀ alkynyl, heteroC₁₋₁₀alkyl, heteroC₂₋₁₀alkenyl, heteroC₂₋₁₀alkynyl, C₃₋₁₀ carbocyclyl, 3-14 membered heterocyclyl, C₆₋₁₄ aryl, and 5-14 membered heteroaryl, or two R^{bb} groups are joined to form a 3-14 membered heterocyclyl or 5-14 membered heteroaryl ring, wherein each alkyl, alkenyl, alkynyl, heteroalkyl, heteroalkenyl, heteroalkynyl, carbocyclyl, heterocyclyl, aryl, and heteroaryl is independently substituted with 0, 1, 2, 3, 4, or 5 R^{dd} groups; wherein X⁻ is a counterion;
[0143] each instance of R^{cc} is, independently, selected from hydrogen, C₁₋₁₀ alkyl, C₁₋₁₀ perhaloalkyl, C₂₋₁₀ alkenyl, C₂₋₁₀ alkynyl, heteroC₁₋₁₀ alkyl, heteroC₂₋₁₀ alkenyl, heteroC₂₋₁₀ alkynyl, C₃₋₁₀ carbocyclyl, 3-14 membered heterocyclyl, C₆₋₁₄ aryl, and 5-14 membered heteroaryl, or two R^{cc} groups are joined to form a 3-14 membered heterocyclyl or 5-14 membered heteroaryl ring, wherein each alkyl, alkenyl, alkynyl, heteroalkyl, heteroalkenyl, heteroalkynyl, carbocyclyl, heterocyclyl, aryl, and heteroaryl is independently substituted with 0, 1, 2, 3, 4, or 5 R^{dd} groups;
[0144] each instance of R^{dd} is, independently, selected from halogen, —CN, —NO₂, —N₃, —SO₂H, —SO₃H, —OH, —OR^{ee}, —ON(R^{ff})₂, —N(R^{ff})₂, —N(R^{ff})₃⁺X⁻, —N(OR^{ee})R^{ff}, —SH, —SR^{ee}, —SSR^{ee}, —C(═O)R^{ee}, —CO₂H, —CO₂R^{ee}, —OC(═O)R^{ee}, —OCO₂R^{ee}, —C(═O)N(R^{ff})₂, —OC(═O)N(R^{ff})₂, —NR^{ff}C(═O)R^{ee}, —NR^{ff}CO₂R^{ee}, —NR^{ff}C(═O)N(R^{ff})₂, —C(═NR^{ff})OR^{ee}, —OC(═NR^{ff})R^{ee}, —OC(═NR^{ff})OR^{ee}, —C(═NR^{ff})N(R^{ff})₂, —OC(═NR^{ff})N(R^{ff})₂, —NR^{ff}C(═NR^{ff})N(R^{ff})₂, —NR^{ff}SO₂R^{ee}, —SO₂N(R^{ff})₂, —SO₂R^{ee}, —SO₂OR^{ee}, —OSO₂R^{ee}, —S(═O)R^{ee}, —Si(R^{ee})₃, —OSi(R^{ee})₃, —C(═S)N(R^{ff})₂, —C(═O)SR^{ee}, —C(═S)SR^{ee}, —SC(═S)SR^{ee}, —P(═O)(OR^{ee})₂, —P(═O)(R^{ee})₂, —OP(═O)(R^{ee})₂, —OP(═O)(OR^{ee})₂, C₁₋₆ alkyl, C₁₋₆ perhaloalkyl, C₂₋₆ alkenyl, C₂₋₆ alkynyl, heteroC₁₋₆alkyl, heteroC₂₋₆alkenyl, heteroC₂₋₆alkynyl, C₃₋₁₀ carbocyclyl, 3-10 membered heterocyclyl, C₆₋₁₀ aryl, 5-10 membered heteroaryl, wherein each alkyl, alkenyl, alkynyl, heteroalkyl, heteroalkenyl, heteroalkynyl, carbocyclyl, heterocyclyl, aryl, and heteroaryl is independently substituted with 0, 1, 2, 3, 4, or 5 R^{gg} groups, or two geminal R^{dd} substituents can be joined to form ═O or ═S; wherein X⁻ is a counterion;
[0145] each instance of R^{ee} is, independently, selected from C₁₋₆ alkyl, C₁₋₆ perhaloalkyl, C₂₋₆ alkenyl, C₂₋₆ alkynyl, heteroC₁₋₆ alkyl, heteroC₂₋₆alkenyl, heteroC₂₋₆ alkynyl, C₃₋₁₀ carbocyclyl, C₆₋₁₀ aryl, 3-10 membered heterocyclyl, and 3-10 membered heteroaryl, wherein each alkyl, alkenyl, alkynyl, heteroalkyl, heteroalkenyl, heteroalkynyl, carbocyclyl, heterocyclyl, aryl, and heteroaryl is independently substituted with 0, 1, 2, 3, 4, or 5 R^{gg} groups;
[0146] each instance of R^{ff} is, independently, selected from hydrogen, C₁₋₆ alkyl, C₁₋₆ perhaloalkyl, C₂₋₆ alkenyl, C₂₋₆ alkynyl, heteroC₁₋₆alkyl, heteroC₂₋₆alkenyl, heteroC₂₋₆alkynyl, C₃₋₁₀ carbocyclyl, 3-10 membered heterocyclyl, C₆₋₁₀ aryl and 5-10 membered heteroaryl, or two R^{ff} groups are joined to form a 3-10 membered heterocyclyl or 5-10 membered heteroaryl ring, wherein each alkyl, alkenyl, alkynyl, heteroalkyl, heteroalkenyl, heteroalkynyl, carbocyclyl, heterocyclyl, aryl, and heteroaryl is independently substituted with 0, 1, 2, 3, 4, or 5 R^{gg} groups; and
[0147] each instance of R^{gg} is, independently, halogen, —CN, —NO₂, —N₃, —SO₂H, —SO₃H, —OH, —OC₁₋₆ alkyl, —ON(C₁₋₆ alkyl)₂, —N(C₁₋₆ alkyl)₂, —N(C₁₋₆ alkyl)₃⁺X⁻, —NH(C₁₋₆ alkyl)₂⁺X⁻, —NH₂(C₁₋₆ alkyl)⁺X⁻, —NH⁺X⁻, —N(OC₁₋₆ alkyl)(C₁₋₆ alkyl), —N(OH)(C₁₋₆ alkyl), —NH(OH), —SH, —SC₁₋₆ alkyl, —SS(C₁₋₆ alkyl), —C(═O)(C₁₋₆ alkyl), —CO₂H, —CO₂(C₁₋₆ alkyl), —OC(═O)(C₁₋₆ alkyl), —OCO₂(C₁₋₆ alkyl), —C(═O)NH₂, —C(═O)N(C₁₋₆ alkyl)₂, —OC(═O)NH(C₁₋₆ alkyl), —NHC(═O)(C₁₋₆ alkyl), —N(C₁₋₆ alkyl)C(═O)(C₁₋₆ alkyl), —NHCO₂(C₁₋₆ alkyl), —NHC(═O)N(C₁₋₆ alkyl)₂, —NHC(═O)NH(C₁₋₆ alkyl), —NHC(═O)NH₂, —C(═NH)O(C₁₋₆ alkyl), —OC(═NH)(C₁₋₆ alkyl), —OC(═NH)OC₁₋₆ alkyl, —C(═NH)N(C₁₋₆ alkyl)₂, —C(═NH)NH(C₁₋₆ alkyl), —C(═NH)NH₂, —OC(═NH)N(C₁₋₆ alkyl)₂, —OC(NH)NH(C₁₋₆ alkyl), —OC(NH)NH₂, —NHC(NH)N(C₁₋₆ alkyl)₂, —NHC(═NH)NH₂, —NHSO₂(C₁₋₆ alkyl), —SO₂N(C₁₋₆ alkyl)₂, —SO₂NH(C₁₋₆ alkyl), —SO₂NH₂, —SO₂C₁₋₆ alkyl, —SO₂OC₁₋₆ alkyl, —OSO₂C₁₋₆ alkyl, —SOC₁₋₆ alkyl, —Si(C₁₋₆ alkyl)₃, —OSi(C₁₋₆ alkyl)₃-C(═S)N(C₁₋₆ alkyl)₂, C(═S)NH(C₁₋₆ alkyl), C(═S)NH₂, —C(═O)S(C₁₋₆ alkyl), —C(═S)SC₁₋₆ alkyl, —SC(═S)SC₁₋₆ alkyl, —P(═O)(OC₁₋₆ alkyl)₂, —P(═O)(C₁₋₆ alkyl)₂, —OP(═O)(C₁₋₆ alkyl)₂, —OP(═O)(OC₁₋₆ alkyl)₂, C₁₋₆ alkyl, C₁₋₆ perhaloalkyl, C₂₋₆ alkenyl, C₂₋₆ alkynyl, heteroC₁₋₆alkyl, heteroC₂₋₆alkenyl, heteroC₂₋₆alkynyl, C₃₋₁₀ carbocyclyl, C₆₋₁₀ aryl, 3-10 membered heterocyclyl, 5-10 membered heteroaryl; or two geminal R^{gg} substituents can be joined to form ═O or ═S; wherein X⁻ is a counterion. Alternatively, two geminal hydrogens on a carbon atom are replaced with the group ═O, ═S, ═NN(R^{bb})₂, ═NNR^{bb}C(═O)R^{aa}, ═NNR^{bb}C(═O)OR^{aa}, ═NNR^{bb}S(═O)₂R^{aa}, ═NR^{bb}, or ═NOR^{cc}; wherein each alkyl, alkenyl, alkynyl, heteroalkyl, heteroalkenyl, heteroalkynyl, carbocyclyl, heterocyclyl, aryl, and heteroaryl is independently substituted with 0, 1, 2, 3, 4, or 5 R^{dd} groups; wherein X⁻ is a counterion;
   wherein:
[0148] each instance of R^{aa} is, independently, selected from C₁₋₁₀ alkyl, C₁₋₁₀ perhaloalkyl, C₂₋₁₀ alkenyl, C₂₋₁₀ alkynyl, heteroC₁₋₁₀ alkyl, heteroC₂₋₁₀ alkenyl, heteroC₂₋₁₀alkynyl, C₃₋₁₀ carbocyclyl, 3-14 membered heterocyclyl, C₆₋₁₄ aryl, and 5-14 membered heteroaryl, or two R^{aa} groups are joined to form a 3-14 membered heterocyclyl or 5-14 membered heteroaryl ring, wherein each alkyl, alkenyl, alkynyl, heteroalkyl, heteroalkenyl, heteroalkynyl, carbocyclyl, heterocyclyl, aryl, and heteroaryl is independently substituted with 0, 1, 2, 3, 4, or 5 R^{dd} groups;
[0149] each instance of R^{bb} is, independently, selected from hydrogen, —OH, —OR^{aa}, —N(R^{cc})₂, —CN, —C(═O)R^{aa}, —C(═O)N(R^{cc})₂, —CO₂R^{aa}, —SO₂R^{aa}, —C(═NR^{cc})OR^{aa}, —C(═NR^{cc})N(R^{cc})₂, —SO₂N(R^{cc})₂, —SO₂R^{cc}, —SO₂OR^{cc}, —SOR^{aa}, —C(═S)N(R^{cc})₂, —C(═O)SR^{cc}, —C(═S)SR^{cc}, —P(═O)(R^{aa})₂, —P(═O)(OR^{cc})₂, —P(═O)(N(R^{cc})₂)₂, C₁₋₁₀ alkyl, C₁₋₁₀ perhaloalkyl, C₂₋₁₀ alkenyl, C₂₋₁₀ alkynyl, heteroC₁₋₁₀alkyl, heteroC₂₋₁₀alkenyl, heteroC₂₋₁₀alkynyl, C₃₋₁₀ carbocyclyl, 3-14 membered heterocyclyl, C₆₋₁₄ aryl, and 5-14 membered heteroaryl, or two R^{bb} groups are joined to form a 3-14 membered heterocyclyl or 5-14 membered heteroaryl ring, wherein each alkyl, alkenyl, alkynyl, heteroalkyl, heteroalkenyl, heteroalkynyl, carbocyclyl, heterocyclyl, aryl, and heteroaryl is independently substituted with 0, 1, 2, 3, 4, or 5 R^{dd} groups; wherein X⁻ is a counterion;
[0150] each instance of R^{cc} is, independently, selected from hydrogen, C₁₋₁₀ alkyl, C₁₋₁₀ perhaloalkyl, C₂₋₁₀ alkenyl, C₂₋₁₀ alkynyl, heteroC₁₋₁₀ alkyl, heteroC₂₋₁₀ alkenyl, heteroC₂₋₁₀ alkynyl, C₃₋₁₀ carbocyclyl, 3-14 membered heterocyclyl, C₆₋₁₄ aryl, and 5-14 membered heteroaryl, or two R^{cc} groups are joined to form a 3-14 membered heterocyclyl or 5-14 membered heteroaryl ring, wherein each alkyl, alkenyl, alkynyl, heteroalkyl, heteroalkenyl, heteroalkynyl, carbocyclyl, heterocyclyl, aryl, and heteroaryl is independently substituted with 0, 1, 2, 3, 4, or 5 R^{dd} groups;
[0151] each instance of R^{dd} is, independently, selected from halogen, —CN, —NO₂, —N₃, —SO₂H, —SO₃H, —OH, —OR^{ee}, —ON(R^{ff})₂, —N(R^{ff})₂, —N(R^{ff})₃⁺X⁻, —N(OR^{ee})R^{ff}, —SH, —SR^{ee}, —SSR^{ee}, —C(═O)R^{ee}, —CO₂H, —CO₂R^{ee}, —OC(═O)R^{ee}, —OCO₂R^{ee}, —C(═O)N(R^{ff})₂, —OC(═O)N(R^{ff})₂, —NR^{ff}C(═O)R^{ee}, —NR^{ff}CO₂R^{ee}, —NR^{ff}C(═O)N(R^{ff})₂, —C(═NR^{ff})OR^{ee}, —OC(═NR^{ff})R^{ee}, —OC(═NR^{ff})OR^{ee}, —C(═NR^{ff})N(R^{ff})₂, —OC(═NR^{ff})N(R^{ff})₂, —NR^{ff}C(═NR^{ff})N(R^{ff})₂, —NR^{ff}SO₂R^{ee}, —SO₂N(R^{ff})₂, —SO₂R^{ee}, —SO₂OR^{ee}, —OSO₂R^{ee}, —S(═O)R^{ee}, —Si(R^{ee})₃, —OSi(R^{ee})₃, —C(═S)N(R^{ff})₂, —C(═O)SR^{ee}, —C(═S)SR^{ee}, —SC(═S)SR^{ee}, —P(═O)(OR^{ee})₂, —P(═O)(R^{ee})₂, —OP(═O)(R^{ee})₂, —OP(═O)(OR^{ee})₂, C₁₋₆ alkyl, C₁₋₆ perhaloalkyl, C₂₋₆ alkenyl, C₂₋₆ alkynyl, heteroC₁₋₆alkyl, heteroC₂₋₆alkenyl, heteroC₂₋₆alkynyl, C₃₋₁₀ carbocyclyl, 3-10 membered heterocyclyl, C₆₋₁₀ aryl, 5-10 membered heteroaryl, wherein each alkyl, alkenyl, alkynyl, heteroalkyl, heteroalkenyl, heteroalkynyl, carbocyclyl, heterocyclyl, aryl, and heteroaryl is independently substituted with 0, 1, 2, 3, 4, or 5 R^{gg} groups, or two geminal R^{dd} substituents can be joined to form ═O or ═S; wherein X⁻ is a counterion;
[0152] each instance of R^{ee} is, independently, selected from C₁₋₆ alkyl, C₁₋₆ perhaloalkyl, C₂₋₆ alkenyl, C₂₋₆ alkynyl, heteroC₁₋₆ alkyl, heteroC₂₋₆alkenyl, heteroC₂₋₆ alkynyl, C₃₋₁₀ carbocyclyl, C₆₋₁₀ aryl, 3-10 membered heterocyclyl, and 3-10 membered heteroaryl, wherein each alkyl, alkenyl, alkynyl, heteroalkyl, heteroalkenyl, heteroalkynyl, carbocyclyl, heterocyclyl, aryl, and heteroaryl is independently substituted with 0, 1, 2, 3, 4, or 5 R^{gg} groups;
[0153] each instance of R^{ff} is, independently, selected from hydrogen, C₁₋₆ alkyl, C₁₋₆ perhaloalkyl, C₂₋₆ alkenyl, C₂₋₆ alkynyl, heteroC₁₋₆alkyl, heteroC₂₋₆alkenyl, heteroC₂₋₆alkynyl, C₃₋₁₀ carbocyclyl, 3-10 membered heterocyclyl, C₆₋₁₀ aryl and 5-10 membered heteroaryl, or two R^{ff} groups are joined to form a 3-10 membered heterocyclyl or 5-10 membered heteroaryl ring, wherein each alkyl, alkenyl, alkynyl, heteroalkyl, heteroalkenyl, heteroalkynyl, carbocyclyl, heterocyclyl, aryl, and heteroaryl is independently substituted with 0, 1, 2, 3, 4, or 5 R^{gg} groups; and
[0154] each instance of R^{gg} is, independently, halogen, —CN, —NO₂, —N₃, —SO₂H, —SO₃H, —OH, —OC₁₋₆ alkyl, —ON(C₁₋₆ alkyl)₂, —N(C₁₋₆ alkyl)₂, —N(C₁₋₆ alkyl)₃⁺X⁻, —NH(C₁₋₆ alkyl)₂⁺X⁻, —NH₂(C₁₋₆ alkyl)⁺X⁻, —NH₃⁺X⁻, —N(OC₁₋₆ alkyl)(C₁₋₆ alkyl), —N(OH)(C₁₋₆ alkyl), —NH(OH), —SH, —SC₁₋₆ alkyl, —SS(C₁₋₆ alkyl), —C(═O)(C₁₋₆ alkyl), —CO₂H, —CO₂(C₁₋₆ alkyl), —OC(═O)(C₁₋₆ alkyl), —OCO₂(C₁₋₆ alkyl), —C(═O)NH₂, —C(═O)N(C₁₋₆ alkyl)₂, —OC(═O)NH(C₁₋₆ alkyl), —NHC(═O)(C₁₋₆ alkyl), —N(C₁₋₆ alkyl)C(═O)(C₁₋₆ alkyl), —NHCO₂(C₁₋₆ alkyl), —NHC(═O)N(C₁₋₆ alkyl)₂, —NHC(═O)NH(C₁₋₆ alkyl), —NHC(═O)NH₂, —C(═NH)O(C₁₋₆ alkyl), —OC(═NH)(C₁₋₆ alkyl), —OC(═NH)OC₁₋₆ alkyl, —C(═NH)N(C₁₋₆ alkyl)₂, —C(═NH)NH(C₁₋₆ alkyl), —C(═NH)NH₂, —OC(═NH)N(C₁₋₆ alkyl)₂, —OC(NH)NH(C₁₋₆ alkyl), —OC(NH)NH₂, —NHC(NH)N(C₁₋₆ alkyl)₂, —NHC(═NH)NH₂, —NHSO₂(C₁₋₆ alkyl), —SO₂N(C₁₋₆ alkyl)₂, —SO₂NH(C₁₋₆ alkyl), —SO₂NH₂, —SO₂C₁₋₆ alkyl, —SO₂OC₁₋₆ alkyl, —OSO₂C₁₋₆ alkyl, —SOC₁₋₆ alkyl, —Si(C₁₋₆ alkyl)₃, —OSi(C₁₋₆ alkyl)₃-C(═S)N(C₁₋₆ alkyl)₂, C(═S)NH(C₁₋₆ alkyl), C(═S)NH₂, —C(═O)S(C₁₋₆ alkyl), —C(═S)SC₁₋₆ alkyl, —SC(═S)SC₁₋₆ alkyl, —P(═O)(OC₁₋₆ alkyl)₂, —P(═O)(C₁₋₆ alkyl)₂, —OP(═O)(C₁₋₆ alkyl)₂, —OP(═O)(OC₁₋₆ alkyl)₂, C₁₋₆ alkyl, C₁₋₆ perhaloalkyl, C₂₋₆ alkenyl, C₂₋₆ alkynyl, heteroC₁₋₆alkyl, heteroC₂₋₆alkenyl, heteroC₂₋₆alkynyl, C₃₋₁₀ carbocyclyl, C₆₋₁₀ aryl, 3-10 membered heterocyclyl, 5-10 membered heteroaryl; or two geminal R^{gg} substituents can be joined to form ═O or ═S; wherein X⁻ is a counterion.

[0155] A “counterion” or “anionic counterion” is a negatively charged group associated with a positively charged group in order to maintain electronic neutrality. An anionic counterion may be monovalent (i.e., including one formal negative charge). An anionic counterion may also be multivalent (i.e., including more than one formal negative charge), such as divalent or trivalent. Exemplary counterions include halide ions (e.g., F⁻, Cl⁻, Br⁻, I⁻), NO₃⁻, ClO₄⁻, OH⁻, H₂PO₄⁻, HCO₃⁻, HSO₄⁻, sulfonate ions (e.g., methansulfonate, trifluoromethanesulfonate, p-toluenesulfonate, benzenesulfonate, 10-camphor sulfonate, naphthalene-2-sulfonate, naphthalene-1-sulfonic acid-5-sulfonate, ethan-1-sulfonic acid-2-sulfonate, and the like), carboxylate ions (e.g., acetate, propanoate, benzoate, glycerate, lactate, tartrate, glycolate, gluconate, and the like), BF₄⁻, PF₄⁻, PF₆⁻, AsF₆⁻, SbF₆⁻, B[3,5-(CF₃)₂C₆H₃]₄]⁻, B(C₆F₅)₄⁻, BPh₄⁻, Al(OC(CF₃)₃)₄⁻, and carborane anions (e.g., CB₁₁H₁₂⁻ or (HCB₁₁Me₅Br₆)⁻). Exemplary counterions which may be multivalent include CO₃²⁻, HPO₄²⁻, PO₄³⁻, B₄O₇²⁻, SO₄²⁻, S₂O₃²⁻, carboxylate anions (e.g., tartrate, citrate, fumarate, maleate, malate, malonate, gluconate, succinate, glutarate, adipate, pimelate, suberate, azelate, sebacate, salicylate, phthalates, aspartate, glutamate, and the like), and carboranes.

[0156] The term “pharmaceutically acceptable salt” refers to those salts which are, within the scope of sound medical judgment, suitable for use in contact with the tissues of humans and lower animals without undue toxicity, irritation, allergic response and the like, and are commensurate with a reasonable benefit/risk ratio. Pharmaceutically acceptable salts are well known in the art. For example, Berge et al., describe pharmaceutically acceptable salts in detail in J. Pharmaceutical Sciences, 1977, 66, 1-19, incorporated by reference. Pharmaceutically acceptable salts of the compounds disclosed in this application include those derived from suitable inorganic and organic acids and bases. Examples of pharmaceutically acceptable, nontoxic acid addition salts are salts of an amino group formed with inorganic acids such as hydrochloric acid, hydrobromic acid, phosphoric acid, sulfuric acid, and perchloric acid or with organic acids such as acetic acid, oxalic acid, maleic acid, tartaric acid, citric acid, succinic acid, or malonic acid or by using other methods known in the art such as ion exchange. Other pharmaceutically acceptable salts include adipate, alginate, ascorbate, aspartate, benzenesulfonate, benzoate, bisulfate, borate, butyrate, camphorate, camphorsulfonate, citrate, cyclopentanepropionate, digluconate, dodecylsulfate, ethanesulfonate, formate, fumarate, glucoheptonate, glycerophosphate, gluconate, hemisulfate, heptanoate, hexanoate, hydroiodide, 2-hydroxy-ethanesulfonate, lactobionate, lactate, laurate, lauryl sulfate, malate, maleate, malonate, methanesulfonate, 2-naphthalenesulfonate, nicotinate, nitrate, oleate, oxalate, palmitate, pamoate, pectinate, persulfate, 3-phenylpropionate, phosphate, picrate, pivalate, propionate, stearate, succinate, sulfate, tartrate, thiocyanate, p-toluenesulfonate, undecanoate, valerate salts, and the like. Salts derived from appropriate bases include alkali metal, alkaline earth metal, ammonium and N⁺(C₁₋₄ alkyl)₄⁻ salts. Representative alkali or alkaline earth metal salts include sodium, lithium, potassium, calcium, magnesium, and the like. Further pharmaceutically acceptable salts include, when appropriate, nontoxic ammonium, quaternary ammonium, and amine cations formed using counterions such as halide, hydroxide, carboxylate, sulfate, phosphate, nitrate, lower alkyl sulfonate, and aryl sulfonate.

[0157] The term “solvate” refers to forms of a compound that are associated with a solvent, usually by a solvolysis reaction. This physical association may include hydrogen bonding. Conventional solvents include water, methanol, ethanol, acetic acid, DMSO, THF, diethyl ether, and the like. The compounds of Formula (1), (9), (10), and (11) may be prepared, e.g., in crystalline form, and may be solvated. Suitable solvates include pharmaceutically acceptable solvates and further include both stoichiometric solvates and non-stoichiometric solvates. In certain instances, the solvate will be capable of isolation, for example, when one or more solvent molecules are incorporated in the crystal lattice of a crystalline solid. “Solvate” encompasses both solution-phase and isolable solvates. Representative solvates include hydrates, ethanolates, and methanolates.

[0158] The term “hydrate” refers to a compound that is associated with water. Typically, the number of the water molecules contained in a hydrate of a compound is in a definite ratio to the number of the compound molecules in the hydrate. Therefore, a hydrate of a compound may be represented, for example, by the general formula R·x H₂O, wherein R is the compound and wherein x is a number greater than 0. A given compound may form more than one type of hydrates, including, e.g., monohydrates (x is 1), lower hydrates (x is a number greater than 0 and smaller than 1, e.g., hemihydrates (R·0.5H₂O)), and polyhydrates (x is a number greater than 1, e.g., dihydrates (R·2H₂O) and hexahydrates (R·6H₂O)).

[0159] The term “tautomers” refer to compounds that are interchangeable forms of a particular compound structure, and that vary in the displacement of hydrogen atoms and electrons. Thus, two structures may be in equilibrium through the movement of n electrons and an atom (usually H). For example, enols and ketones are tautomers because they are rapidly interconverted by treatment with either acid or base. Another example of tautomerism is the aci- and nitro-forms of phenylnitromethane, which are likewise formed by treatment with acid or base. Tautomeric forms may be relevant to the attainment of the optimal chemical reactivity and biological activity of a compound of interest.

[0160] It is also to be understood that compounds that have the same molecular formula but differ in the nature or sequence of bonding of their atoms or the arrangement of their atoms in space are termed “isomers.” Isomers that differ in the arrangement of their atoms in space are termed “stereoisomers.”

[0161] Stereoisomers that are not mirror images of one another are termed “diastereomers” and those that are non-superimposable mirror images of each other are termed “enantiomers.” When a compound has an asymmetric center, for example, it is bonded to four different groups, a pair of enantiomers is possible. An enantiomer can be characterized by the absolute configuration of its asymmetric center and described by the R- and S-sequencing rules of Cahn and Prelog. An enantiomer can also be characterized by the manner in which the molecule rotates the plane of polarized light, and designated as dextrorotatory or levorotatory (i.e., as (+) or (−)-isomers respectively). A chiral compound can exist as either an individual enantiomer or as a mixture of enantiomers. A mixture containing equal proportions of the enantiomers is called a “racemic mixture.”

[0162] The term “co-crystal” refers to a crystalline structure comprising at least two different components (e.g., a compound described in this application and an acid), wherein each of the components is independently an atom, ion, or molecule. In certain embodiments, none of the components is a solvent. In certain embodiments, at least one of the components is a solvent. A co-crystal of a compound and an acid is different from a salt formed from a compound and the acid. In the salt, a compound described in this application is complexed with the acid in a way that proton transfer (e.g., a complete proton transfer) from the acid to a compound described in this application easily occurs at room temperature. In the co-crystal, however, a compound described in this application is complexed with the acid in a way that proton transfer from the acid to a compound described in this application does not easily occur at room temperature. In certain embodiments, in the co-crystal, there is no proton transfer from the acid to a compound described in this application. In certain embodiments, in the co-crystal, there is partial proton transfer from the acid to a compound described in this application. Co-crystals may be useful to improve the properties (e.g., solubility, stability, and ease of formulation) of a compound described in this application.

[0163] The term “polymorphs” refers to a crystalline form of a compound (or a salt, hydrate, or solvate thereof) in a particular crystal packing arrangement. All polymorphs of the same compound have the same elemental composition. Different crystalline forms usually have different X-ray diffraction patterns, infrared spectra, melting points, density, hardness, crystal shape, optical and electrical properties, stability, and solubility. Recrystallization solvent, rate of crystallization, storage temperature, and other factors may cause one crystal form to dominate. Various polymorphs of a compound can be prepared by crystallization under different conditions.

[0164] The term “prodrug” refers to compounds, including derivatives of the compounds of Formula (X), (8), (9), (10), or (11), that have cleavable groups and become by solvolysis or under physiological conditions the compounds of Formula (X), (8), (9), (10), or (11) and that are pharmaceutically active in vivo. The prodrugs may have attributes such as, without limitation, solubility, bioavailability, tissue compatibility, or delayed release in a mammalian organism. Examples include, but are not limited to, derivatives of compounds described in this application, including derivatives formed from glycosylation of the compounds described in this application (e.g., glycoside derivatives), carrier-linked prodrugs (e.g., ester derivatives), bioprecursor prodrugs (a prodrug metabolized by molecular modification into the active compound), and the like. Non-limiting examples of glycoside derivatives are disclosed in and incorporated by reference from PCT Publication No. WO2018/208875 and U.S. Patent Publication No. 2019/0078168. Non-limiting examples of ester derivatives are disclosed in and incorporated by reference from U.S. Patent Publication No. US2017/0362195.

[0165] Other derivatives of the compounds of this invention have activity in both their acid and acid derivative forms, but the acid sensitive form often offers advantages of solubility, bioavailability, tissue compatibility, or delayed release in a mammalian organism (see, Bundgard, H., Design of Prodrugs, pp. 7-9, 21-24, Elsevier, Amsterdam 1985). Prodrugs include acid derivatives well known to practitioners of the art, such as, for example, esters prepared by reaction of the parent acid with a suitable alcohol, or amides prepared by reaction of the parent acid compound with a substituted or unsubstituted amine, or acid anhydrides, or mixed anhydrides. Simple aliphatic or aromatic esters, amides, and anhydrides derived from acidic groups pendant on the compounds of this invention are particular prodrugs. In some cases it is desirable to prepare double ester type prodrugs such as (acyloxy)alkyl esters or ((alkoxycarbonyl)oxy)alkylesters. C₁-C₈ alkyl, C₂-C₈ alkenyl, C₂-C₈ alkynyl, aryl, C₇-C₁₂ substituted aryl, and C₇-C₁₂ arylalkyl esters of the compounds of Formula (X), (8), (9), (10), or (11) may be preferred.

### Cannabinoids

[0166] As used in this application, the term “cannabinoid” includes compounds of Formula (X):

[chemical structure]

or a pharmaceutically acceptable salt, co-crystal, tautomer, stereoisomer, solvate, hydrate, polymorph, isotopically enriched derivative, or prodrug thereof, wherein R1 is hydrogen, optionally substituted acyl, optionally substituted alkyl, optionally substituted alkenyl, optionally substituted alkynyl, optionally substituted carbocyclyl, or optionally substituted aryl; R2 and R6 are, independently, hydrogen or carboxyl; R3 and R5 are, independently, hydroxyl, halogen, or alkoxy; and R4 is a hydrogen or an optionally substituted prenyl moiety; or optionally R4 and R3 are taken together with their intervening atoms to form a cyclic moiety, or optionally R4 and R5 are taken together with their intervening atoms to form a cyclic moiety, or optionally both 1) R4 and R3 are taken together with their intervening atoms to form a cyclic moiety and 2) R4 and R5 are taken together with their intervening atoms to form a cyclic moiety. In certain embodiments, R4 and R3 are taken together with their intervening atoms to form a cyclic moiety. In certain embodiments, R4 and R5 are taken together with their intervening atoms to form a cyclic moiety. In certain embodiments, “cannabinoid” refers to a compound of Formula (X), or a pharmaceutically acceptable salt thereof. In certain embodiments, both 1) R4 and R3 are taken together with their intervening atoms to form a cyclic moiety and 2) R4 and R5 are taken together with their intervening atoms to form a cyclic moiety.

[0167] In some embodiments, cannabinoids may be synthesized via the following steps: a) one or more reactions to incorporate three additional ketone moieties onto an acyl-CoA scaffold, where the acyl moiety in the acyl-CoA scaffold comprises between four and fourteen carbons; b) a reaction cyclizing the product of step (a); and c) a reaction to incorporate a prenyl moiety to the product of step (b) or a derivative of the product of step (b). In some embodiments, non-limiting examples of the acyl-CoA scaffold described in step (a) include hexanoyl-CoA and butyryl-CoA. In some embodiments, non-limiting examples of the product of step (b) or a derivative of the product of step (b) include olivetolic acid, divarinic acid, and sphaerophorolic acid.

[0168] In some embodiments, a cannabinoid compound of Formula (X) is of Formula (X-A), (X-B), or (X-C):

[chemical structure]

or a pharmaceutically acceptable salt, solvate, hydrate, polymorph, co-crystal, tautomer, stereoisomer, isotopically labeled derivative, or prodrug thereof;
wherein [symbol] is a double bond or a single bond, as valency permits;
[0169] R is hydrogen, optionally substituted acyl, optionally substituted alkyl, optionally substituted alkenyl, optionally substituted alkynyl, optionally substituted carbocyclyl, or optionally substituted aryl;
[0170] R^{Z1} is hydrogen, optionally substituted acyl, optionally substituted alkyl, optionally substituted alkenyl, optionally substituted alkynyl, optionally substituted carbocyclyl, or optionally substituted aryl;
[0171] R^{Z2} is hydrogen, optionally substituted acyl, optionally substituted alkyl, optionally substituted alkenyl, optionally substituted alkynyl, optionally substituted carbocyclyl, or optionally substituted aryl;
[0172] or optionally, R^{Z1} and R^{Z2} are taken together with their intervening atoms to form an optionally substituted carbocyclic ring;
[0173] R^{3A} is hydrogen, optionally substituted acyl, optionally substituted alkyl, optionally substituted alkenyl, or optionally substituted alkynyl;
[0174] R^{3B} is hydrogen, optionally substituted acyl, optionally substituted alkyl, optionally substituted alkenyl, or optionally substituted alkynyl;
[0175] R^{Y} is hydrogen, optionally substituted acyl, optionally substituted alkyl, optionally substituted alkenyl, or optionally substituted alkynyl;
[0176] R^{Z} is hydrogen, optionally substituted acyl, optionally substituted alkyl, optionally substituted alkenyl, or optionally substituted alkynyl.

[0177] In certain embodiments, a cannabinoid compound is of Formula (X-A):

[chemical structure]

wherein [symbol] is a double bond, and each of R^{Z1} and R^{Z2} is hydrogen, one of R^{3A} and R^{3B} is optionally substituted C₂₋₆ alkenyl, and the other one of R^{3A} and R^{3B} is optionally substituted C₂₋₆ alkyl. In some embodiments, a cannabinoid compound of Formula (X) is of Formula (X-A), wherein each of R^{Z1} and R^{Z2} is hydrogen, one of R^{3A} and R^{3B} is a prenyl group, and the other one of R^{3A} and R^{3B} is optionally substituted methyl.

[0178] In certain embodiments, a cannabinoid compound of Formula (X) of Formula (X-A) is of Formula (11-z):

[chemical structure]

wherein [symbol] is a double bond or single bond, as valency permits; one of R^{3A} and R^{3B} is C₁₋₆ alkyl optionally substituted with alkenyl, and the other of R^{3A} and R^{3B} is optionally substituted C₁₋₆ alkyl. In certain embodiments, in a compound of Formula (11-z), [symbol] is a single bond; one of R^{3A} and R^{3B} is C₁₋₆ alkyl optionally substituted with prenyl; and the other of one of R^{3A} and R^{3B} is unsubstituted methyl; and R is as described in this application. In certain embodiments, in a compound of Formula (11-z), [symbol] is a single bond; one of R^{3A} and R^{3B} is

[chemical structure]

and the other of one of R^{3A} and R^{3B} is unsubstituted methyl; and R is as described in this application. In certain embodiments, a cannabinoid compound of Formula (11-z) is of Formula (11a):

[chemical structure]

[0179] In certain embodiments, a cannabinoid compound of Formula (X) of Formula (X-A) is of Formula (11a):

[chemical structure]

[0180] In certain embodiments, a cannabinoid compound of Formula (X-A) is of Formula (10-z):

[chemical structure]

wherein [symbol] is a double bond or single bond, as valency permits; R^{Y} is hydrogen, optionally substituted acyl, optionally substituted alkyl, optionally substituted alkenyl, or optionally substituted alkynyl; and each of R^{3A} and R^{3B} is independently optionally substituted C₁₋₆ alkyl. In certain embodiments, in a compound of Formula (10-z), [symbol] is a single bond; each of R^{3A} and R^{3B} is unsubstituted methyl, and R is as described in this application. In certain embodiments, a cannabinoid compound of Formula (10-z) is of Formula (10a):

[chemical structure]

In certain embodiments, a compound of Formula (10a)

[chemical structure]

has a chiral atom labeled with * at carbon 10 and a chiral atom labeled with ** at carbon 6. In certain embodiments, in a compound of Formula (10a)

[chemical structure]

the chiral atom labeled with * at carbon 10 is of the R-configuration or S-configuration; and a chiral atom labeled with ** at carbon 6 is of the R-configuration. In certain embodiments, in a compound of Formula (10a)

[chemical structure]

the chiral atom labeled with * at carbon 10 is of the S-configuration; and a chiral atom labeled with ** at carbon 6 is of the R-configuration or S-configuration. In certain embodiments, in a compound of Formula (10a)

[chemical structure]

the chiral atom labeled with * at carbon 10 is of the R-configuration and a chiral atom labeled with ** at carbon 6 is of the R-configuration. In certain embodiments, a compound of Formula (10a)

[chemical structure]

is of the formula:

[chemical structure]

In certain embodiments, in a compound of Formula (10a)

[chemical structure]

the chiral atom labeled with * at carbon 10 is of the S-configuration and a chiral atom labeled with ** at carbon 6 is of the S-configuration. In certain embodiments, a compound of Formula (10a)

[chemical structure]

is of the formula:

[chemical structure]

[0181] In certain embodiments, a cannabinoid compound is of Formula (X-B):

[chemical structure]

wherein [symbol] is a double bond; R^{Y} is hydrogen, optionally substituted acyl, optionally substituted alkyl, optionally substituted alkenyl, or optionally substituted alkynyl; and each of R^{3A} and R^{3B} is independently optionally substituted C₁₋₆ alkyl. In certain embodiments, in a compound of Formula (X-B), R^{Y} is optionally substituted C₁₋₆ alkyl; one of R^{3A} and R^{3B} is [symbol] ; and the other one of R^{3A} and R^{3B} is unsubstituted methyl, and R is as described in this application. In certain embodiments, a compound of Formula (X-B) is of Formula (9a):

[chemical structure]

In certain embodiments, a compound of Formula (9a)

[chemical structure]

has a chiral atom labeled with * at carbon 3 and a chiral atom labeled with ** at carbon 4. In certain embodiments, in a compound of Formula (9a)

[chemical structure]

the chiral atom labeled with * at carbon 3 is of the R-configuration or S-configuration; and a chiral atom labeled with ** at carbon 4 is of the R-configuration. In certain embodiments, in a compound of Formula (9a)

[chemical structure]

the chiral atom labeled with * at carbon 3 is of the S-configuration; and a chiral atom labeled with ** at carbon 4 is of the R-configuration or S-configuration. In certain embodiments, in a compound of Formula (9a)

[chemical structure]

the chiral atom labeled with * at carbon 3 is of the R-configuration and a chiral atom labeled with ** at carbon 4 is of the R-configuration. In certain embodiments, a compound of Formula (9a)

[chemical structure]

is of the formula:

[chemical structure]

In certain embodiments, in a compound of Formula (9a)

[chemical structure]

the chiral atom labeled with * at carbon 3 is of the S-configuration and a chiral atom labeled with ** at carbon 4 is of the S-configuration. In certain embodiments, a compound of Formula (9a)

[chemical structure]

is of the formula:

[chemical structure]

[0182] In certain embodiments, a cannabinoid compound is of Formula (X-C):

[chemical structure]

wherein R^{Z} is optionally substituted alkyl or optionally substituted alkenyl. In certain embodiments, a compound of Formula (X-C) is of formula:

[chemical structure]

wherein a is 1, 2, 3, 4, 5, 6, 7, 8, 9, or 10. In certain embodiments, a is 1. In certain embodiments, a is 2. In certain embodiments, a is 3. In certain embodiments, a is 1, 2, or 3 for a compound of Formula (X-C). In certain embodiments, a cannabinoid compound is of Formula (X-C), and a is 1, 2, 3, 4, or 5. In certain embodiments, a compound of Formula (X-C) is of Formula (8a):

[chemical structure]

[0183] In some embodiments, cannabinoids of the present disclosure comprise cannabinoid receptor ligands. Cannabinoid receptors are a class of cell membrane receptors in the G protein-coupled receptor superfamily. Cannabinoid receptors include the CB₁ receptor and the CB₂ receptor. In some embodiments, cannabinoid receptors comprise GPR18, GPR55, and PPAR. (See Bram et al. “Activation of GPR18 by cannabinoid compounds: a tale of biased agonism” Br J Pharmcol v171 (16) (2014); Shi et al. “The novel cannabinoid receptor GPR55 mediates anxiolytic-like effects in the medial orbital cortex of mice with acute stress” Molecular Brain 10, No. 38 (2017); and O'Sullvan, Elizabeth. “An update on PPAR activation by cannabinoids” Br J Pharmcol v. 173(12) (2016)).

[0184] In some embodiments, cannabinoids comprise endocannabinoids, which are substances produced within the body, and phytocannabinoids, which are cannabinoids that are naturally produced by plants of genus Cannabis. In some embodiments, phytocannabinoids comprise the acidic and decarboxylated acid forms of the naturally-occurring plant-derived cannabinoids, and their synthetic and biosynthetic equivalents.

[0185] Over 94 phytocannabinoids have been identified to date (Berman, Paula, et al. “A new ESI-LC/MS approach for comprehensive metabolic profiling of phytocannabinoids in Cannabis.” Scientific reports 8.1 (2018): 14280; El-Alfy et al., 2010, “Antidepressant-like effect of delta-9-tetrahydrocannabinol and other cannabinoids isolated from Cannabis sativa L”, Pharmacology Biochemistry and Behavior 95 (4): 434-42; Rudolf Brenneisen, 2007, Chemistry and Analysis of Phytocannabinoids, Citti, Cinzia, et al. “A novel phytocannabinoid isolated from Cannabis sativa L. with an in vivo cannabimimetic activity higher than Δ9-tetrahydrocannabinol: Δ9-Tetrahydrocannabiphorol.” Sci Rep 9 (2019): 20335, each of which is incorporated by reference in this application in its entirety). In some embodiments, cannabinoids comprise Δ⁹-tetrahydrocannabinol (THC) type (e.g., (−)-trans-delta-9-tetrahydrocannabinol or dronabinol, (+)-trans-delta-9-tetrahydrocannabinol, (−)-cis-delta-9-tetrahydrocannabinol, or (+)-cis-delta-9-tetrahydrocannabinol), cannabidiol (CBD) type, cannabigerol (CBG) type, cannabichromene (CBC) type, cannabicyclol (CBL) type, cannabinodiol (CBND) type, or cannabitriol (CBT) type cannabinoids, or any combination thereof (see, e.g., R Pertwee, ed, Handbook of Cannabis (Oxford, UK: Oxford University Press, 2014)), which is incorporated by reference in this application in its entirety). A non-limiting list of cannabinoids comprises: cannabiorcol-C1 (CBNO), CBND-C1 (CBNDO), Δ⁹-trans-Tetrahydrocannabiorcolic acid-C1 (Δ⁹-THCO), Cannabidiorcol-C1 (CBDO), Cannabiorchromene-C1 (CBCO), (−)-Δ⁸-trans-(6aR,10aR)-Tetrahydrocannabiorcol-C1 (Δ⁸-THCO), Cannabiorcyclol C1 (CBLO), CBG-C1 (CBGO), Cannabinol-C2 (CBN-C2), CBND-C2, Δ⁹-THC-C2, CBD-C2, CBC-C2, A-THC-C2, CBL-C2, Bisnor-cannabielsoin-C1 (CBEO), CBG-C2, Cannabivarin-C3 (CBNV), Cannabinodivarin-C3 (CBNDV), (−)-Δ⁹-trans-Tetrahydrocannabivarin-C3 (Δ⁹-THCV), (−)-Cannabidivarin-C3 (CBDV), (+)-Cannabichromevarin-C3 (CBCV), (−)-Δ⁸-trans-THC-C3 (Δ⁸-THCV), (±)-(1aS,3aR,8bR,8cR)-Cannabicyclovarin-C3 (CBLV), 2-Methyl-2-(4-methyl-2-pentenyl)-7-propyl-2H-1-benzopyran-5-ol, Δ⁷-tetrahydrocannabivarin-C3 (Δ⁷-THCV), CBE-C2, Cannabigerovarin-C3 (CBGV), Cannabitriol-C1 (CBTO), Cannabinol-C4 (CBN-C4), CBND-C4, (−)-Δ⁹-trans-Tetrahydrocannabinol-C4 (Δ⁹-THC-C4), Cannabidiol-C4 (CBD-C4), CBC-C4, (−)-trans-Δ⁸-THC-C4, CBL-C4, Cannabielsoin-C3 (CBEV), CBG-C4, CBT-C2, Cannabichromanone-C3, Cannabiglendol-C3 (OH-iso-HHCV-C3), Cannabioxepane-C5 (CBX), Dehydrocannabifuran-C5 (DCBF), Cannabinol-C5 (CBN), Cannabinodiol-C5 (CBND), (−)-Δ⁹-trans-Tetrahydrocannabinol-C5 (Δ⁹-THC), (−)-Δ⁸-trans-(6aR,10aR)-Tetrahydrocannabinol-C5 (Δ⁸-THC), (f)-Cannabichromene-C5 (CBC), (−)-Cannabidiol-C5 (CBD), (±)-(1aS,3aR,8bR,8cR)-CannabicycloiC5 (CBL), Cannabicitran-C5 (CBR), (−)-Δ⁹-(6aS,10aR-cis)-Tetrahydrocannabinol-C5 ((−)-cis-Δ⁹-THC), (−)-Δ⁷-trans-(1R,3R,6R)-Isotetrahydrocannabinol-C5 (trans-isoΔ⁷-THC), CBE-C4, Cannabigerol-C5 (CBG), Cannabitriol-C3 (CBTV), Cannabinol methyl ether-C5 (CBNM), CBNDM-C5, 8-OH—CBN-C5 (OH-CBN), OH-CBND-C5 (OH-CBND), 10-Oxo-Δ^{6a(10a)}-Tetrahydrocannabinol-C5 (OTHC), Cannabichromanone D-C5, Cannabicoumaronone-C5 (CBCON-C5), Cannabidiol monomethyl ether-C5 (CBDM), Δ⁹-THCM-C5, (±)-3″-hydroxy-Δ⁴″-cannabichromene-C5, (5aS,6S,9R,9aR)-Cannabielsoin-C5 (CBE), 2-geranyl-5-hydroxy-3-n-pentyl-1,4-benzoquinone-C5, 5-geranyl olivetolic acid, 5-geranyl olivetolate, 8α-Hydroxy-Δ⁹-Tetrahydrocannabinol-C5 (8α-OH-Δ⁹-THC), 8β-Hydroxy-Δ⁹-Tetrahydrocannabinol-C5 (8β-OH-Δ⁹-THC), 10α-Hydroxy-Δ⁸-Tetrahydrocannabinol-C5 (10α-OH-Δ⁸-THC), 10β-Hydroxy-Δ⁸-Tetrahydrocannabinol-C5 (10β-OH-Δ⁸-THC), 10α-hydroxy-Δ^{9,11}-hexahydrocannabinol-C5, 9β,10β-Epoxyhexahydrocannabinol-C5, OH-CBD-C5 (OH-CBD), Cannabigerol monomethyl ether-C5 (CBGM), Cannabichromanone-C5, CBT-C4, (±)-6,7-cis-epoxycannabigerol-C5, (+)-6,7-trans-epoxycannabigerol-C5, (−)-7-hydroxycannabichromane-C5, Cannabimovone-C5, (−)-trans-Cannabitriol-C5 ((−)-trans-CBT), (+)-trans-Cannabitriol-C5 ((+)-trans-CBT), (+)-cis-Cannabitriol-C5 ((t)-cis-CBT), (−)-trans-10-Ethoxy-9-hydroxy-Δ^{6a(10a)}-tetrahydrocannabivarin-C3 [(−)-trans-CBT-OEt], (−)-(6aR,9S,10S,10aR)-9,10-Dihydroxyhexahydrocannabinol-C5 [(−)-Cannabiripsol] (CBR), Cannabichromanone C-C5, (−)-6a,7,10a-Trihydroxy-Δ⁹-tetrahydrocannabinol-C5 [(−)-Cannabitetrol] (CBTT), Cannabichromanone B-C5, 8,9-Dihydroxy-Δ^{6a(10a)}-tetrahydrocannabinol-C5 (8,9-Di-OHCBT), (±)-4-acetoxycannabichromene-C5, 2-acetoxy-6-geranyl-3-n-pentyl-1,4-benzoquinone-C5, 11-Acetoxy-Δ9-TetrahydrocannabinolC5 (11-OAc-Δ9-THC), 5-acetyl-4-hydroxycannabigerol-C5, 4-acetoxy-2-geranyl-5-hydroxy-3-npentylphenol-C5, (−)-trans-10-Ethoxy-9-hydroxy-Δ^{6a(10a)}-tetrahydrocannabinol-C5 ((−)-trans-CBTOEt), sesquicannabigerol-C5 (SesquiCBG), carmagerol-C5, 4-terpenyl cannabinolate-C5, β-fenchyl-Δ⁹-tetrahydrocannabinolate-C5, α-fenchyl-Δ⁹-tetrahydrocannabinolate-C5, epi-bornyl-Δ⁹-tetrahydrocannabinolate-C5, bornyl-Δ⁹-tetrahydrocannabinolate-C5, α-terpenyl-Δ⁹-tetrahydrocannabinolate-C5, 4-terpenyl-Δ⁹-tetrahydrocannabinolate-C5, 6,6,9-trimethyl-3-pentyl-6H-dibenzo[b,d]pyran-1-ol, 3-(1,1-dimethylheptyl)-6,6a,7,8,10,10a-hexahydro-1-hydroxy-6,6-dimethyl-9H-dibenzo[b,d]pyran-9-one, (−)-(3S,4S)-7-hydroxy-Δ⁶-tetrahydrocannabinol-1,1-dimethylheptyl, (±)-(3S,4S)-7-hydroxy-Δ⁶-tetrahydrocannabinol-1,1-dimethylheptyl, 11-hydroxy-Δ⁹-tetrahydrocannabinol, and Δ⁸-tetrahydrocannabinol-11-oic acid)); certain piperidine analogs (e.g., (−)-(6S,6aR,9R,10aR)-5,6,6a,7,8,9,10,10a-octahydro-6-methyl-3-[(R)-1-methyl-4-phenylbutoxy]-1,9-phenanthridinediol 1-acetate)), certain aminoalkylindole analogs (e.g., (R)-(+)-[2,3-dihydro-5-methyl-3-(4-morpholinylmethyl)-pyrrolo[1,2,3-de]-1,4-benzoxazin-6-yl]-1-naphthalenyl-methanone), certain open pyran ring analogs (e.g., 2-[3-methyl-6-(1-methylethenyl)-2-cyclohexen-1-yl]-5-pentyl-1,3-benzenediol and 4-(1,1-dimethylheptyl)-2,3′-dihydroxy-6′alpha-(3-hydroxypropyl)-1′,2′,3′,4′,5′,6′-hexahydrobiphenyl, tetrahydrocannabiphorol (THCP), cannabidiphorol (CBDP), CBGP, CBCP, their acidic forms, salts of the acidic forms, dimers of any combination of the above, trimers of any combination of the above, polymers of any combination of the above, or any combination thereof.

[0186] A cannabinoid described in this application can be a rare cannabinoid. For example, in some embodiments, a cannabinoid described in this application corresponds to a cannabinoid that is naturally produced in conventional Cannabis varieties at concentrations of less than 10%, 9%, 8%, 7%, 6%, 5%, 4%, 3%, 2%, 1%, 0.9%, 0.8%, 0.7%, 0.6%, 0.5%, 0.25%, or 0.1% by dry weight of the female flower. In some embodiments, rare cannabinoids include CBGA, CBGVA, THCVA, CBDVA, CBCVA, and CBCA. In some embodiments, rare cannabinoids are cannabinoids that are not THCA, THC, CBDA or CBD.

[0187] A cannabinoid described in this application can also be a non-rare cannabinoid.

[0188] In some embodiments, the cannabinoid is selected from the cannabinoids listed in Table 1.

TABLE 1
Non-limiting examples of cannabinoids according to the present disclosure.

[chemical structure]

Δ⁹-Tetrahydro-
cannabinol
Δ⁹-THC-C₅

[chemical structure]

Δ⁹-Tetrahydro-
cannabinol-C₄
Δ⁹-THC-C₄

[chemical structure]

Δ⁹-Tetrahydro-
cannabivarin
Δ⁹-THCV-C₃

[chemical structure]

Δ⁹-Tetrahydro-
cannabiorcol
Δ⁹-THCO-C₁

[chemical structure]

(−)-(6aS, 10aR)-Δ⁹-
Tetrahydro-
cannabinol
(−)-cis-Δ⁹-THC-C₅

[chemical structure]

Δ⁹-Tetrahydro-
cannabinolic acid A
Δ⁹-THCA-C₅ A

[chemical structure]

Δ⁹- Tetrahydro-
cannabinolic acid B
Δ⁹-THCA-C₅ B

[chemical structure]

Δ⁹-Tetrahydro-
cannabinolic acid-C₄
A and/or B
Δ⁹-THCA-C₄ A
and/or B

[chemical structure]

Δ⁹-Tetrahydro-
cannabivarinic acid
A
Δ⁹-THCVA-C₃ A

[chemical structure]

Δ⁹-Tetrahydro-
cannabiorcolic acid
A and/or B
Δ⁹-THCOA-C₁ A
and/or B

[chemical structure]

(−)-Δ⁸-trans-
(6aR,10aR)-
Δ⁸-Tetrahydro-
cannabinol
Δ⁸-THC-C₅

[chemical structure]

(−)-Δ⁸-trans-
(6aR, 10aR)-
Tetrahydro-
cannabinolic
acid A
Δ⁸-THCA-C₅ A

[chemical structure]

(−)-Cannabidiol
CBD-C5

[chemical structure]

Cannabidiol
momomethyl ether
CBDM-C5

[chemical structure]

Cannabidiol-C₄
CBD-C4

[chemical structure]

Cannabidiolic acid
CBDA-C5

[chemical structure]

Cannabidivarinic acid
CBDVA-C3

[chemical structure]

(−)-Cannabidivarin
CBDV-C3

[chemical structure]

Cannabidiorcol
CBD-C1

[chemical structure]

Cannabigerolic acid
A
(E)-CBGA-C₅ A

[chemical structure]

Cannabigerol
(E)-CBG-C₅

[chemical structure]

Cannabigerol
monomethyl ether
(E)-CBGM-C₅ A

[chemical structure]

Cannabinerolic acid
A
(Z)-CBGA-C₅ A

[chemical structure]

Cannabigerovarin
(E)-CBGV-C₃

[chemical structure]

Cannabigerol
(E)-CBG-C₅

[chemical structure]

Cannabigerolic acid
A
(E)-CBGA-C₅ A

[chemical structure]

Cannabigerolic acid A
monomethyl ether
(E)-CBGAM-C₅ A

[chemical structure]

Cannabigerovarinic
acid A
(E)-CBGVA-C₃ A

[chemical structure]

Cannabinolic acid A
CBNA-C5 A

[chemical structure]

Cannabinol methyl
ether
CBNM-C5

[chemical structure]

Cannabinol
CBN-C5

[chemical structure]

Cannabinol-C4
CBN-C4

[chemical structure]

Cannabivarin
CBN-C3

[chemical structure]

Cannabinol-C2
CBN-C2

[chemical structure]

Cannabiorcol
CBN-C1

[chemical structure]

(±)-Cannabichromene
CBC-C₅

[chemical structure]

(±)-Cannabichromenic
acid A
CBCA-C₅ A

[chemical structure]

(±)-Cannabivarichro-
mene,
(±)-
Cannabichromevarin
CBCV-C₃

[chemical structure]

(±)-Cannabichro-
mevarinic
acid A
CBCVA-C₃ A

[chemical structure]

(±)-
Cannabichromene
CBC-C₅

[chemical structure]

(±)-
(1aS,3aR,8bR,8cR)-
Cannabicyclol
CBL-C₅

[chemical structure]

(±)-
(1aS,3aR,8bR,8cR)-
Cannabicyclolic acid
A
CBLA-Cs A

[chemical structure]

(±)-
(1aS,3aR,8bR,8cR)-
Cannabicyclovarin
CBLV-C₃

[chemical structure]

(−)-(9R,10R)-trans-
10-O-Ethyl-
cannabitriol
(−)-trans-CBT-OEt-
C5

[chemical structure]

(±)-
(9R,10R/98,10S)-
Cannabitriol-C3
(±)-trans-CBT-C3

[chemical structure]

(−)-(9R,10R)-trans-
Cannabitriol
(−)-trans-CBT-C5

[chemical structure]

(+)-(9S,10S)-
Cannabitriol
(+)-trans-CBT-C5

[chemical structure]

(±)-
(9R,108/9S,10R)-
Cannabitriol
(+)-cis-CBT-C5

[chemical structure]

(−)-6a,7,10a-
Trihydroxy-
Δ9-tetrahydro-
cannabinol
(−)-Cannabitetrol

[chemical structure]

10-Oxo-A6a(10a)-
tetrahydro-
cannabinol
OTHC

[chemical structure]

8,9-Dihydroxy-
Δ6a(10a)-
tetrahydro-cannabinol
8,9-Di-OH-CBT-C5

[chemical structure]

Cannabidiolic acid A
cannabitriol ester
CBDA-C5 9-OH-
CBT-C5 ester

[chemical structure]

(−)-
(6aR,9S,10S,10aR)-
9,10-Dihydroxy-
bexahydro-
cannabinol,
Cannabiripsol
Cannabiripsol-C5

[chemical structure]

(5aS,6S,9R,9aR)-
Cannabielsoic acid B
CBEA-C5 B

[chemical structure]

(5aS,68,9R,9aR)-
C3-Cannabielsoic
acid B
CBEA-C3 B

[chemical structure]

(5aS,6S,9R,9aR)-
Cannabielsoin
CBE-C5

[chemical structure]

(5aS,6S,9R,9aR)-
C3-Cannabielsoin
CBE-C3

[chemical structure]

(5aS,6S,9R,9aR)-
Cannabielsoic acid A
CBEA-C5 A

[chemical structure]

Cannabiglendol-C3
OH-iso-HHCV-C3

[chemical structure]

Dehydro-
cannabifuran
DCBF-C5

[chemical structure]

Cannabifuran
CBF-C5

[chemical structure]

Cannabidiphorol
(CBDP)

[chemical structure]

Tetrahydro-
cannabiphorol
(THCP)

[chemical structure]

[0189] Cannabinoids are often classified by “type,” i.e., by the topological arrangement of their prenyl moieties (See, for example, M. A. Elsohly and D. Slade, Life Sci., 2005, 78, 539-548; and L. O. Hanus et al. Nat. Prod. Rep., 2016, 33, 1357). Generally, each “type” of cannabinoid includes the variations possible for ring substitutions of the resorcinol moiety at the position meta to the two hydroxyl moieties. As used herein, a “CBG-type” cannabinoid is a 3-[(2E)-3,7-dimethylocta-2,6-dienyl]-2,4-dihydroxybenzoic acid optionally substituted at the 6 position of the benzoic acid moiety. As used herein, “CBG-type” cannabinoids refer to 5-hydroxy-2-methyl-2-(4-methylpent-3-enyl)-chromene-6-carboxylic acid optionally substituted at the 7 position of the chromene moiety. As used herein, a “THC-type” cannabinoid is a (6aR,10aR)-1-hydroxy-6,6,9-trimethyl-6a,7, 8,10a-tetrahydrobenzo[c]chromene-2-carboxylic acid optionally substituted at the 3 position of the benzo[c]chromene moiety. As used herein, a “CBD-type” cannabinoid is a 2,4-dihydroxy-3-[(1R,6R)-3-methyl-6-prop-1-en-2-ylcyclohex-2-en-1-yl]-benzoic acid optionally substituted at the 6 position of the benzoic acid moiety. In some embodiments, the optional ring substitution for each “type” is an optionally substituted C1-C11 alkyl, an optionally substituted C1-C11 alkenyl, an optionally substituted C1-C11 alkynyl, or an optionally substituted C1-C11 aralkyl.

### Biosynthesis of Cannabinoids and Cannabinoid Precursors

[0190] Aspects of the present disclosure provide tools, sequences, and methods for the biosynthetic production of cannabinoids in host cells. In some embodiments, the present disclosure teaches expression of enzymes that are capable of producing cannabinoids by biosynthesis.

[0191] As a non-limiting example, one or more of the enzymes depicted in FIG. 2 may be used to produce a cannabinoid or cannabinoid precursor of interest. FIG. 1 shows a cannabinoid biosynthesis pathway for the most abundant phytocannabinoids found in Cannabis. See also, de Meijer et al. I, II, III, and IV (I: 2003, Genetics, 163:335-346; II: 2005, Euphytica, 145:189-198; III: 2009, Euphytica, 165:293-311; and IV: 2009, Euphytica, 168:95-112), and Carvalho et al. “Designing Microorganisms for Heterologous Biosynthesis of Cannabinoids” (2017) FEMS Yeast Research June 1; 17(4), each of which is incorporated by reference in this application in its entirety.

[0192] It should be appreciated that a precursor substrate for use in cannabinoid biosynthesis is generally selected based on the cannabinoid of interest. Non-limiting examples of cannabinoid precursors include compounds of Formulae (1)-(8) in FIG. 2. In some embodiments, polyketides, including compounds of Formula (5), could be prenylated. In certain embodiments, the precursor is a precursor compound shown in FIG. 1, 2, or 3. Substrates in which R contains 1-40 carbon atoms are preferred. In some embodiments, substrates in which R contains 3-8 carbon atoms are most preferred.

[0193] As used in this application, a cannabinoid or a cannabinoid precursor may comprise an R group. See, e.g., FIG. 2. In some embodiments, R may be a hydrogen. In certain embodiments, R is optionally substituted alkyl. In certain embodiments, R is optionally substituted C1-40 alkyl. In certain embodiments, R is optionally substituted C2-40 alkyl. In certain embodiments, R is optionally substituted C2-40 alkyl, which is straight chain or branched alkyl. In certain embodiments, R is optionally substituted C3-8 alkyl. In certain embodiments, R is optionally substituted C1-C40 alkyl, C1-C20 alkyl, C1-C10 alkyl, C1-C8 alkyl, C1-C5 alkyl, C3-C5 alkyl, C3 alkyl, or C5 alkyl. In certain embodiments, R is optionally substituted C1-C20 alkyl. In certain embodiments, R is optionally substituted C1-C10 alkyl. In certain embodiments, R is optionally substituted C1-C8 alkyl. In certain embodiments, R is optionally substituted C1-C5 alkyl. In certain embodiments, R is optionally substituted C1-C7 alkyl. In certain embodiments, R is optionally substituted C3-C5 alkyl. In certain embodiments, R is optionally substituted C3 alkyl. In certain embodiments, R is unsubstituted C3 alkyl. In certain embodiments, R is n-C3 alkyl. In certain embodiments, R is n-propyl. In certain embodiments, R is n-butyl. In certain embodiments, R is n-pentyl. In certain embodiments, R is n-hexyl. In certain embodiments, R is n-heptyl. In certain embodiments, R is of formula:

[chemical structure]

In certain embodiments, R is optionally substituted C4 alkyl. In certain embodiments, R is unsubstituted C4 alkyl. In certain embodiments, R is optionally substituted C5 alkyl. In certain embodiments, R is unsubstituted C5 alkyl. In certain embodiments, R is optionally substituted C6 alkyl. In certain embodiments, R is unsubstituted C6 alkyl. In certain embodiments, R is optionally substituted C7 alkyl. In certain embodiments, R is unsubstituted C7 alkyl. In certain embodiments, R is of formula:

[chemical structure]

In certain embodiments, R is of formula:

[chemical structure]

In certain embodiments, R is of formula:

[chemical structure]

In certain embodiments, R is of formula:

[chemical structure]

In certain embodiments, R is of formula:

[chemical structure]

In certain embodiments, R is optionally substituted n-propyl. In certain embodiments, R is n-propyl optionally substituted with optionally substituted aryl. In certain embodiments, R is n-propyl optionally substituted with optionally substituted phenyl. In certain embodiments, R is n-propyl substituted with unsubstituted phenyl. In certain embodiments, R is optionally substituted butyl. In certain embodiments, R is optionally substituted n-butyl. In certain embodiments, R is n-butyl optionally substituted with optionally substituted aryl. In certain embodiments, R is n-butyl optionally substituted with optionally substituted phenyl. In certain embodiments, R is n-butyl substituted with unsubstituted phenyl. In certain embodiments, R is optionally substituted pentyl. In certain embodiments, R is optionally substituted n-pentyl. In certain embodiments, R is n-pentyl optionally substituted with optionally substituted aryl. In certain embodiments, R is n-pentyl optionally substituted with optionally substituted phenyl. In certain embodiments, R is n-pentyl substituted with unsubstituted phenyl. In certain embodiments, R is optionally substituted hexyl. In certain embodiments, R is optionally substituted n-hexyl. In certain embodiments, R is optionally substituted n-heptyl. In certain embodiments, R is optionally substituted n-octyl. In certain embodiments, R is alkyl optionally substituted with aryl (e.g., phenyl). In certain embodiments, R is optionally substituted acyl (e.g., —C(═O)Me).

[0194] In certain embodiments, R is optionally substituted alkenyl (e.g., substituted or unsubstituted C₂₋₆ alkenyl). In certain embodiments, R is substituted or unsubstituted C₂₋₆ alkenyl. In certain embodiments, R is substituted or unsubstituted C₂₋₅ alkenyl. In certain embodiments, R is of formula:

[chemical structure]

In certain embodiments, R is optionally substituted alkynyl (e.g., substituted or unsubstituted C₂₋₆ alkynyl). In certain embodiments, R is substituted or unsubstituted C₂₋₆ alkynyl. In certain embodiments, R is of formula:

[chemical structure]

In certain embodiments, R is optionally substituted carbocyclyl. In certain embodiments, R is optionally substituted aryl (e.g., phenyl or napthyl).

[0195] The chain length of a precursor substrate can be from C1-C40. Those substrates can have any degree and any kind of branching or saturation or chain structure, including, without limitation, aliphatic, alicyclic, and aromatic. In addition, they may include any functional groups including hydroxy, halogens, carbohydrates, phosphates, methyl-containing or nitrogen-containing functional groups.

[0196] For example, FIG. 3 shows a non-exclusive set of putative precursors for the cannabinoid pathway. Aliphatic carboxylic acids including four to eight total carbons (“C4”-“C8” in FIG. 3) and up to 10-12 total carbons with either linear or branched chains may be used as precursors for the heterologous pathway. Non-limiting examples include methanoic acid, butyric acid, pentanoic acid, hexanoic acid, heptanoic acid, isovaleric acid, octanoic acid, and decanoic acid. Additional precursors may include ethanoic acid and propanoic acid. In some embodiments, in addition to acids, the ester, salt, and acid forms may all be used as substrates. Substrates may have any degree and any kind of branching, saturation, and chain structure, including, without limitation, aliphatic, alicyclic, and aromatic. In addition, they may include any functional modifications or combination of modifications including, without limitation, halogenation, hydroxylation, amination, acylation, alkylation, phenylation, and/or installation of pendant carbohydrates, phosphates, sulfates, heterocycles, or lipids, or any other functional groups.

[0197] Substrates for any of the enzymes disclosed in this application may be provided exogenously or may be produced endogenously by a host cell. In some embodiments, the cannabinoids are produced from a glucose substrate, so that compounds of Formula 1 shown in FIG. 2 and CoA precursors are synthesized by the cell. In other embodiments, a precursor is fed into the reaction. In some embodiments, a precursor is a compound selected from Formulae 1-8 in FIG. 2.

[0198] Cannabinoids produced by methods disclosed in this application include rare cannabinoids. Due to the low concentrations at which cannabinoids, including rare cannabinoids occur in nature, producing industrially significant amounts of isolated or purified cannabinoids from the Cannabis plant may become prohibitive due to, e.g., the large volumes of Cannabis plants, and the large amounts of space, labor, time, and capital requirements to grow, harvest, and/or process the plant materials (see, for example, Crandall, K., 2016. A Chronic Problem: Taming Energy Costs and Impacts from Marijuana Cultivation. EQ Research; Mills, E., 2012. The carbon footprint of indoor Cannabis production. Energy Policy, 46, pp. 58-67; Jourabchi, M. and M. Lahet. 2014. Electrical Load Impacts of Indoor Commercial Cannabis Production. Presented to the Northwest Power and Conservation Council; O'Hare, M., D. Sanchez, and P. Alstone. 2013. Environmental Risks and Opportunities in Cannabis Cultivation. Washington State Liquor and Cannabis Board; 2018. Comparing Cannabis Cultivation Energy Consumption. New Frontier Data; and Madhusoodanan, J., 2019. Can cannabis go green? Nature Outlook: Cannabis; all of which are incorporated by reference in this disclosure). The disclosure provided in this application represents a potentially efficient method for producing high yields of cannabinoids, including rare cannabinoids. The disclosure provided in this application also represents a potential method for addressing concerns related to agricultural practices and water usage associated with traditional methods of cannabinoid production (Dillis et al. “Water storage and irrigation practices for cannabis drive seasonal patterns of water extraction and use in Northern California.” Journal of Environmental Management 272 (2020): 110955, incorporated by reference in this disclosure).

[0199] Cannabinoids produced by the disclosed methods also include non-rare cannabinoids. Without being bound by a particular theory, the methods described in this application may be advantageous compared with traditional plant-based methods for producing non-rare cannabinoids. For example, methods provided in this application represent potentially efficient means for producing consistent and high yields of non-rare cannabinoids. With traditional methods of cannabinoid production, in which cannabinoids are harvested from plants, maintaining consistent and uniform conditions, including airflow, nutrients, lighting, temperature, and humidity, can be difficult. For example, with plant-based methods, there can be microclimates created by branching, which can lead to inconsistent yields and by-product formation. In some embodiments, the methods described in this application are more efficient at producing a cannabinoid of interest as compared to harvesting cannabinoids from plants. For example, with plant-based methods, seed-to-harvest can take up to half a year, while cutting-to-harvest usually takes about 4 months. Additional steps including drying, curing, and extraction are also usually needed with plant-based methods. In contrast, in some embodiments, the fermentation-based methods described in this application only take about 1, 2, 3, 4, 5, 6, 7, 8, 9, or 10 days. In some embodiments, the fermentation-based methods described in this application only take about 3-5 days. In some embodiments, the fermentation-based methods described in this application only take about 5 days. In some embodiments, the methods provided in this application reduce the amount of security needed to comply with regulatory standards. For example, a smaller secured area may be needed to be monitored and secured to practice the methods described in this application as compared to the cultivation of plants. In some embodiments, the methods described in this application are advantageous over plant-sourced cannabinoids.

### Terminal Synthases (TS)

[0200] A host cell described in this application may comprise a terminal synthase (TS). As used in this application, a “TS” refers to an enzyme that is capable of catalyzing oxidative cyclization of a prenyl moiety (e.g., terpene) to produce a ring-containing product (e.g., heterocyclic ring-containing product). In certain embodiments, a TS is capable of catalyzing oxidative cyclization of a prenyl moiety (e.g., terpene) to produce a carbocyclic-ring containing product (e.g., cannabinoid). In certain embodiments, a TS is capable of catalyzing oxidative cyclization of a prenyl moiety (e.g., terpene) to produce a heterocyclic-ring containing product (e.g., cannabinoid). In certain embodiments, a TS is capable of catalyzing oxidative cyclization of a prenyl moiety (e.g., terpene) to produce a cannabinoid.

[0201] TS enzymes are monomers that include FAD-binding and Berberine Bridge Enzyme (BBE) sequence motifs.

[0202] In some embodiments, the TS is an “ancestral” terminal synthase. Ancestral TSes can be generated from probabilistic models of mutations applied to terminal synthase phylogenes based on transcriptomic datasets. For example, Hochberg et al., describe a process for reconstructing ancestral proteins in Annu. Rev. Biophys. 2017. 46:247-69, which is incorporated by reference in its entirety in this disclosure.

[0203] a. Substrates

[0204] A TS may be capable of using one or more substrates. In some instances, the location of the prenyl group and/or the R group differs between TS substrates. For example, a TS may be capable of using as a substrate one or more compounds of Formula (8w), Formula (8x), Formula (8′), Formula (8y), and/or Formula (8z):

[chemical structure]

or a pharmaceutically acceptable salt, solvate, hydrate, polymorph, co-crystal, tautomer, stereoisomer, isotopically labeled derivative, or prodrug thereof, wherein a is 1, 2, 3, 4, 5, 6, 7, 8, 9, or 10.

[0205] In certain embodiments, a compound of Formula (8′) is a compound of Formula (8):

[chemical structure]

[0206] In some embodiments, R is hydrogen, an optionally substituted C1-C11 alkyl, an optionally substituted C1-C11 alkenyl, an optionally substituted C1-C11 alkynyl, or an optionally substituted C1-C11 aralkyl.

[0207] In some embodiments, a TS catalyzes oxidative cyclization of the prenyl moiety (e.g., terpene) of a compound of Formula (8) described in this application and shown in FIG. 2. In certain embodiments, a compound of Formula (8) is a compound of Formula (8a):

[chemical structure]

[0208] In some embodiments, the production of a compound of Formula (11) from a particular substrate may be assessed relative to the production of a compound of Formula (11) from a control substrate. In some embodiments, the production of a compound of Formula (10) from a particular substrate may be assessed relative to the production of a compound of Formula (10) from a control substrate. In some embodiments, the production of a compound of Formula (9) from a particular substrate may be assessed relative to the production of a compound of Formula (9) from a control substrate.

[0209] b. Products

[0210] In some embodiments, TS enzymes catalyze the formation of CBD-type cannabinoids, THC-type cannabinoids and/or CBC-type cannabinoids from CBG-type cannabinoids. In embodiments where CBGA is the substrate, the TS enzymes CBDAS, THCAS and CBCAS would generally catalyze the formation of cannabidiolic acid (CBDA), A9-tetrahydrocannabinolic acid (THCA) and cannabichromenic acid (CBCA), respectively. However, in some embodiments, a TS can produce more than one different product depending on reaction conditions. Product promiscuity has been noted among the Cannabis terminal synthases (e.g., Zirpel et al., J. Biotechnol. 2018 Apr. 20, 272:40-7). Without wishing to be bound by any theory, it is believed that the reaction conditions affect the protonation state and orientation of the amino acids that form the substrate binding site of the TS enzymes, which may affect the docking of the substrate and/or products of these enzymes. For example, the pH of the reaction environment may cause a THCAS or a CBDAS to produce CBCA in greater proportions than THCA or CBDAS, respectively (see, for example, U.S. Pat. No. 9,359,625 to Winnicki and Donsky, incorporated by reference in its entirety). In some embodiments, a TS has a predetermined product specificity in intracellular conditions, such as cytosolic conditions or organelle conditions. By expressing a TS with a predetermined product specificity based on intracellular conditions, in vivo products produced by a cell expressing the TS may be more predictably produced. In some embodiments, a TS produces a desired product at a pH of 5.5. In some embodiments, a TS produces a desired product at a pH of 1, 2, 3, 4, 5, 6, 7, 8, 9, 10, 11, 12, 13 or 14. In some embodiments, a TS produces a desired product at a pH that is between 4.5 and 8.0. In some embodiments, a TS produces a desired product at a pH that is between 5 and 6. In some embodiments, a TS produces a desired product at a pH that is around 4.5, 4.6, 4.7, 4.8, 4.9, 5.0, 5.1, 5.2, 5.3, 5.4, 5.5, 5.6, 5.7, 5.8, 5.9, 6.0, 6.1, 6.2, 6.3, 6.4, 6.5, 6.6, 6.7, 6.8, 6.9, 7.0, 7.1, 7.2, 7.3, 7.4, 7.5, 7.6, 7.7, 7.8, 7.9, or 8.0, including all values in between. In some embodiments, the product profile of a TS is dependent on the TS's signal peptide because the signal peptide targets the TS to a particular intracellular location having particular intracellular conditions (e.g., a particular organelle) that regulate the type of product produced by the TS. Exemplary signal peptides are discussed in further detail below. Differences in the intracellular conditions can affect the activity of the TS enzymes, for example, due to variations in pH and/or differences in the folding of TS enzymes due to the presence of chaperone proteins.

[0211] A TS may be capable of using one or more substrates described in this application to produce one or more products. Non-limiting example of TS products are shown in Table 1. In some instances, a TS is capable of using one substrate to produce 1, 2, 3, 4, 5, 6, 7, 8, 9, or 10 different products. In some embodiments, a TS is capable of using more than one substrate to produce 1, 2, 3, 4, 5, 6, 7, 8, 9, or 10 different products.

[0212] In some embodiments, a TS is capable of producing a compound of Formula (X-A) and/or a compound of Formula (X-B):

[chemical structure]

or a pharmaceutically acceptable salt, solvate, hydrate, polymorph, co-crystal, tautomer, stereoisomer, isotopically labeled derivative, or prodrug thereof;
wherein [symbol] is a double bond or a single bond, as valency permits;
[0213] R is hydrogen, optionally substituted acyl, optionally substituted alkyl, optionally substituted alkenyl, optionally substituted alkynyl, optionally substituted carbocyclyl, or optionally substituted aryl;
[0214] R^{Z1} is hydrogen, optionally substituted acyl, optionally substituted alkyl, optionally substituted alkenyl, optionally substituted alkynyl, optionally substituted carbocyclyl, or optionally substituted aryl;
[0215] R^{Z2} is hydrogen, optionally substituted acyl, optionally substituted alkyl, optionally substituted alkenyl, optionally substituted alkynyl, optionally substituted carbocyclyl, or optionally substituted aryl;
[0216] or optionally, R^{Z1} and R^{Z2} are taken together with their intervening atoms to form an optionally substituted carbocyclic ring;
[0217] R^{3A} is hydrogen, optionally substituted acyl, optionally substituted alkyl, optionally substituted alkenyl, or optionally substituted alkynyl;
[0218] R^{3B} is hydrogen, optionally substituted acyl, optionally substituted alkyl, optionally substituted alkenyl, or optionally substituted alkynyl, and/or
[0219] R^{Y} is hydrogen, optionally substituted acyl, optionally substituted alkyl, optionally substituted alkenyl, or optionally substituted alkynyl.

[0220] In some embodiments, a compound of Formula (X-A) is:

[chemical structure]

(Tetrahydrocannabinolic acid (THCA) (10a)).

[0221] In certain embodiments, a compound of Formula (10)

[chemical structure]

has a chiral atom labeled with * at carbon 10 and a chiral atom labeled with ** at carbon 6. In certain embodiments, in a compound of Formula (10)

[chemical structure]

the chiral atom labeled with * at carbon 10 is of the R-configuration or S-configuration; and a chiral atom labeled with ** at carbon 6 is of the R-configuration. In certain embodiments, in a compound of Formula (10)

[chemical structure]

the chiral atom labeled with * at carbon 10 is of the S-configuration; and a chiral atom labeled with ** at carbon 6 is of the R-configuration or S-configuration. In certain embodiments, in a compound of Formula (10)

[chemical structure]

the chiral atom labeled with * at carbon 10 is of the R-configuration and a chiral atom labeled with ** at carbon 6 is of the R-configuration. In certain embodiments, a compound of Formula (10)

[chemical structure]

is of the formula:

[chemical structure]

In certain embodiments, in a compound of Formula (10)

[chemical structure]

the chiral atom labeled with * at carbon 10 is of the S-configuration and a chiral atom labeled with ** at carbon 6 is of the S-configuration. In certain embodiments, a compound of Formula (10)

[chemical structure]

is of the formula:

[chemical structure]

[0222] In certain embodiments, a compound of Formula (10a)

[chemical structure]

has a chiral atom labeled with * at carbon 10 and a chiral atom labeled with ** at carbon 6. In certain embodiments, in a compound of Formula (10a)

[chemical structure]

the chiral atom labeled with * at carbon 10 is of the R-configuration or S-configuration; and a chiral atom labeled with ** at carbon 6 is of the R-configuration. In certain embodiments, in a compound of Formula (10a)

[chemical structure]

the chiral atom labeled with * at carbon 10 is of the S-configuration; and a chiral atom labeled with ** at carbon 6 is of the R-configuration or S-configuration. In certain embodiments, in a compound of Formula (10a)

[chemical structure]

the chiral atom labeled with * at carbon 10 is of the R-configuration and a chiral atom labeled with ** at carbon 6 is of the R-configuration. In certain embodiments, a compound of Formula (10a)

[chemical structure]

is of the formula

[chemical structure]

In certain embodiments, in a compound of Formula (10a)

[chemical structure]

the chiral atom labeled with * at carbon 10 is of the S-configuration and a chiral atom labeled with ** at carbon 6 is of the S-configuration. In certain embodiments, a compound of Formula (10a)

[chemical structure]

is of the formula:

[chemical structure]

[0223] In some embodiments, a compound of Formula (X-A) is:

[chemical structure]

[0224] In some embodiments, a compound of Formula (X-A) is;

[chemical structure]

[0225] In some embodiments, a compound of Formula (X-B) is:

[chemical structure]

[0226] In certain embodiments, a compound of Formula (9)

[chemical structure]

has a chiral atom labeled with * at carbon 3 and a chiral atom labeled with ** at carbon 4. In certain embodiments, in a compound of Formula (9)

[chemical structure]

the chiral atom labeled with * at carbon 3 is of the R-configuration or S-configuration; and a chiral atom labeled with ** at carbon 4 is of the R-configuration. In certain embodiments, in a compound of Formula (9)

[chemical structure]

the chiral atom labeled with * at carbon 3 is of the 5-configuration; and a chiral atom labeled with ** at carbon 4 is of the R-configuration or S-configuration. In certain embodiments, in a compound of Formula (9)

[chemical structure]

the chiral atom labeled with * at carbon 3 is of the R-configuration and a chiral atom labeled with ** at carbon 4 is of the R-configuration. In certain embodiments, a compound of Formula (9)

[chemical structure]

is of the formula:

[chemical structure]

In certain embodiments, in a compound of Formula (9)

[chemical structure]

the chiral atom labeled with * at carbon 3 is of the S-configuration and a chiral atom labeled with ** at carbon 4 is of the S-configuration. In certain embodiments, a compound of Formula (9)

[chemical structure]

is of the formula:

[chemical structure]

[0227] In certain embodiments, a compound of Formula (9a) (CBDA)

[chemical structure]

has a chiral atom labeled with * at carbon 3 and a chiral atom labeled with ** at carbon 4. In certain embodiments, in a compound of Formula (9a)

[chemical structure]

the chiral atom labeled with * at carbon 3 is of the R-configuration or S-configuration; and a chiral atom labeled with ** at carbon 4 is of the R-configuration. In certain embodiments, in a compound of Formula (9a)

[chemical structure]

the chiral atom labeled with * at carbon 3 is of the S-configuration; and a chiral atom labeled with ** at carbon 4 is of the R-configuration or S-configuration. In certain embodiments, in a compound of Formula (9a)

[chemical structure]

the chiral atom labeled with * at carbon 3 is of the R-configuration and a chiral atom labeled with ** at carbon 4 is of the R-configuration. In certain embodiments, a compound of Formula (9a)

[chemical structure]

is of the formula:

[chemical structure]

In certain embodiments, in a compound of Formula (9a)

[chemical structure]

the chiral atom labeled with * at carbon 3 is of the S-configuration and a chiral atom labeled with ** at carbon 4 is of the S-configuration. In certain embodiments, a compound of Formula (9a)

[chemical structure]

is of the formula:

[chemical structure]

[0228] In some embodiments, as shown in FIG. 2, a TS is capable of producing a cannabinoid from the product of a PT, including, without limitation, an enzyme capable of producing a compound of Formula (9), (10), or (11):

[chemical structure]

or a pharmaceutically acceptable salt, solvate, hydrate, polymorph, co-crystal, tautomer, stereoisomer, isotopically labeled derivative, or prodrug thereof, wherein R is hydrogen, optionally substituted acyl, optionally substituted alkyl, optionally substituted alkenyl, optionally substituted alkynyl, optionally substituted carbocyclyl, or optionally substituted aryl; produced from a compound of Formula (8′):

[chemical structure]

wherein a is 1, 2, 3, 4, 5, 6, 7, 8, 9, or 10; and R is hydrogen, optionally substituted acyl, optionally substituted alkyl, optionally substituted alkenyl, optionally substituted alkynyl, optionally substituted carbocyclyl, or optionally substituted aryl; or using any other substrate. In certain embodiments, a compound of Formula (8′) is a compound of Formula (8):

[chemical structure]

[0229] In certain embodiments, a compound of Formula (9), (10), or (11) is produced using a TS from a substrate compound of Formula (8′) (e.g., compound of Formula (8)), for example. Non-limiting examples of substrate compounds of Formula (8′) include but are not limited to cannabigerolic acid (CBGA), cannabigerovarinic acid (CBGVA), or cannabinerolic acid. In certain embodiments, at least one of the hydroxyl groups of the product compounds of Formula (9), (10), or (11) is further methylated. In certain embodiments, a compound of Formula (9) is methylated to form a compound of Formula (12):

[chemical structure]

or a pharmaceutically acceptable salt, solvate, hydrate, polymorph, co-crystal, tautomer, stereoisomer, isotopically labeled derivative, or prodrug thereof.

[0230] Any of the enzymes, host cells, and methods described in this application may be used for the production of cannabinoids and cannabinoid precursors, such as those provided in Table 1. In general, the term “production” is used to refer to the generation of one or more products (e.g., products of interest and/or by-products/off-products), for example, from a particular substrate or reactant. The amount of production may be evaluated at any one or more steps of a pathway, such as a final product or an intermediate product, using metrics familiar to one of ordinary skill in the art. For example, the amount of production may be assessed for a single enzymatic reaction (e.g., conversion of a compound of Formula (8) to a compound of Formula (10) by a TS). Alternatively or in addition, the amount of production may be assessed for a series of enzymatic reactions (e.g., the biosynthetic pathway shown in FIG. 1 and/or FIG. 2). Production may be assessed by any metrics known in the art, for example, by assessing volumetric productivity, enzyme kinetics/reaction rate, specific productivity biomass-specific productivity, titer, yield, and total titer of one or more products (e.g., products of interest and/or by-products/off-products).

[0231] In some embodiments, the metric used to measure production may depend on whether a continuous process is being monitored (e.g., several cannabinoid biosynthesis steps are used in combination) or whether a particular end product is being measured. For example, in some embodiments, metrics used to monitor production by a continuous process may include volumetric productivity, enzyme kinetics and reaction rate. In some embodiments, metrics used to monitor production of a particular product may include specific productivity, biomass-specific productivity, titer, yield, and/or total titer of one or more products (e.g., products of interest and/or by-products/off-products).

[0232] Production of one or more products (e.g., products of interest and/or by-products/off-products) may be assessed indirectly, for example by determining the amount of a substrate remaining following termination of the reaction/fermentation. For example, for a TS that catalyzes the formation of products (e.g., a compound of Formula (10), including tetrahydrocannabinolic acid (THCA) (Formula (10a)) from a compound of Formula (8), including CBGA (Formula 8(a))), production of the products may be assessed by quantifying the compound of Formula (10) directly or by quantifying the amount of substrate remaining following the reaction (e.g., amount of the compound of Formula (8)). For a TS that catalyzes the formation of products (e.g., a compound of Formula (9), including cannabidiolic acid (CBDA) (Formula (9a)) from a compound of Formula (8), including CBGA (Formula 8(a))), production of the products may be assessed by quantifying the compound of Formula (9) directly or by quantifying the amount of substrate remaining following the reaction (e.g., amount of the compound of Formula (8)). For a TS that catalyzes the formation of products (e.g., a compound of Formula (11), including cannabichromenic acid (CBCA)(Formula (11a)) from a compound of Formula (8), including CBGA (Formula 8(a))), production of the products may be assessed by quantifying the compound of Formula (11) directly or by quantifying the amount of substrate remaining following the reaction (e.g., amount of the compound of Formula (8)).

[0233] In some embodiments, a TS that exhibits high production of by-products but low production of a desired product may still be used, for example if one or more amino acid substitutions, insertions, and/or deletions are introduced into the TS to shift production to the desired product, or if the TS can be expressed at locations where reaction conditions favor the production of the desired product. In some embodiments, the TS is a THCAS or has THCAS activity. Non-limiting by-products of a THCAS include compounds of Formulae (9) and (11) and a product resulting from the terpene of a compound of Formula (8) cyclizing with the other open —OH group (at carbon 1). In some embodiments, the TS is a CBDAS or has CBDAS activity. Non-limiting by-products of a CBDAS include compounds of Formulae (10) and (11) and a product resulting from the terpene of a compound of Formula (8) cyclizing with the other open —OH group (at carbon 1). In some embodiments, the TS is a CBCAS or has CBCAS activity. Non-limiting by-products of a CBCAS include compounds of Formula (9) or (10) and a product resulting from the terpene of a compound of Formula (8) cyclizing with the other open —OH group (at carbon 1). The carbons in a compound of Formula (8) may be numbered as follows:

[chemical structure]

### See, e.g., Hanus et al., Nat Prod Rep. 2016 Nov. 23; 33(12):1357-1392.

[0234] In some embodiments, the production of a product (e.g., product of interest and/or by-product/off-product) by a particular TS may be assessed as relative production, for example relative to a control TS. In some embodiments, the production of a product by a particular host cell may be assessed relative to a control host cell.

[0235] In some embodiments, a TS or a host cell associated with the disclosure may be capable of producing a product at a higher titer or yield relative to a control. In some embodiments, a TS may be capable of producing a product at a faster rate (e.g., higher productivity) relative to a control. In some embodiments, a TS may have preferential binding and/or activity towards one substrate relative to another substrate. In some embodiments, a TS may preferentially produce one product relative to another product.

[0236] In some embodiments, a TS may produce at least 0.0001 μg/L, at least 0.001 μg/L, at least 0.01 μg/L, at least 0.02 μg/L, at least 0.03 μg/L, at least 0.04 μg/L, at least 0.05 μg/L, at least 0.06 μg/L, at least 0.07 μg/L, at least 0.08 μg/L, at least 0.09 μg/L, at least 0.1 μg/L, at least 0.11 μg/L, at least 0.12 μg/L, at least 0.13 μg/L, at least 0.14 μg/L, at least 0.15 μg/L, at least 0.16 μg/L, at least 0.17 μg/L, at least 0.18 μg/L, at least 0.19 μg/L, at least 0.2 μg/L, at least 0.21 μg/L, at least 0.22 μg/L, at least 0.23 μg/L, at least 0.24 μg/L, at least 0.25 μg/L, at least 0.26 μg/L, at least 0.27 μg/L, at least 0.28 μg/L, at least 0.29 μg/L, at least 0.3 μg/L, at least 0.31 μg/L, at least 0.32 μg/L, at least 0.33 μg/L, at least 0.34 μg/L, at least 0.35 μg/L, at least 0.36 μg/L, at least 0.37 μg/L, at least 0.38 μg/L, at least 0.39 μg/L, at least 0.4 μg/L, at least 0.41 μg/L, at least 0.42 μg/L, at least 0.43 μg/L, at least 0.44 μg/L, at least 0.45 μg/L, at least 0.46 μg/L, at least 0.47 μg/L, at least 0.48 μg/L, at least 0.49 μg/L, at least 0.5 μg/L, at least 0.51 μg/L, at least 0.52 μg/L, at least 0.53 μg/L, at least 0.54 μg/L, at least 0.55 μg/L, at least 0.56 μg/L, at least 0.57 μg/L, at least 0.58 μg/L, at least 0.59 μg/L, at least 0.6 μg/L, at least 0.61 μg/L, at least 0.62 μg/L, at least 0.63 μg/L, at least 0.64 μg/L, at least 0.65 μg/L, at least 0.66 μg/L, at least 0.67 μg/L, at least 0.68 μg/L, at least 0.69 μg/L, at least 0.7 μg/L, at least 0.71 μg/L, at least 0.72 μg/L, at least 0.73 μg/L, at least 0.74 μg/L, at least 0.75 μg/L, at least 0.76 μg/L, at least 0.77 μg/L, at least 0.78 μg/L, at least 0.79 μg/L, at least 0.8 μg/L, at least 0.81 μg/L, at least 0.82 μg/L, at least 0.83 μg/L, at least 0.84 μg/L, at least 0.85 μg/L, at least 0.86 μg/L, at least 0.87 μg/L, at least 0.88 μg/L, at least 0.89 μg/L, at least 0.9 μg/L, at least 0.91 μg/L, at least 0.92 μg/L, at least 0.93 μg/L, at least 0.94 μg/L, at least 0.95 μg/L, at least 0.96 μg/L, at least 0.97 μg/L, at least 0.98 μg/L, at least 0.99 μg/L, at least 1 μg/L, at least 1.1p g/L, at least 1.2 μg/L, at least 1.3 μg/L, at least 1.4 μg/L, at least 1.5 μg/L, at least 1.6 μg/L, at least 1.7 μg/L, at least 1.8 μg/L, at least 1.9 μg/L, at least 2 μg/L, at least 2.1 μg/L, at least 2.2 μg/L, at least 2.3 μg/L, at least 2.4 μg/L, at least 2.5 μg/L, at least 2.6 μg/L, at least 2.7 μg/L, at least 2.8 μg/L, at least 2.9 μg/L, at least 3 μg/L, at least 3.1 μg/L, at least 3.2 μg/L, at least 3.3 μg/L, at least 3.4 μg/L, at least 3.5 μg/L, at least 3.6 μg/L, at least 3.7 μg/L, at least 3.8 μg/L, at least 3.9 μg/L, at least 4 μg/L, at least 4.1 μg/L, at least 4.2 μg/L, at least 4.3 μg/L, at least 4.4 μg/L, at least 4.5 μg/L, at least 4.6 μg/L, at least 4.7 μg/L, at least 4.8 μg/L, at least 4.9 μg/L, at least 5 μg/L, at least 5.1 μg/L, at least 5.2 μg/L, at least 5.3 μg/L, at least 5.4 μg/L, at least 5.5 μg/L, at least 5.6 μg/L, at least 5.7 μg/L, at least 5.8 μg/L, at least 5.9 μg/L, at least 6 μg/L, at least 6.1 μg/L, at least 6.2 μg/L, at least 6.3 μg/L, at least 6.4 μg/L, at least 6.5 μg/L, at least 6.6 μg/L, at least 6.7 μg/L, at least 6.8 μg/L, at least 6.9 μg/L, at least 7 μg/L, at least 7.1 μg/L, at least 7.2 μg/L, at least 7.3 μg/L, at least 7.4 μg/L, at least 7.5 μg/L, at least 7.6 μg/L, at least 7.7 μg/L, at least 7.8 μg/L, at least 7.9 μg/L, at least 8 μg/L, at least 8.1 μg/L, at least 8.2 μg/L, at least 8.3 μg/L, at least 8.4 μg/L, at least 8.5 μg/L, at least 8.6 μg/L, at least 8.7 μg/L, at least 8.8 μg/L, at least 8.9 μg/L, at least 9 μg/L, at least 9.1 μg/L, at least 9.2 μg/L, at least 9.3 μg/L, at least 9.4 μg/L, at least 9.5 μg/L, at least 9.6 μg/L, at least 9.7 μg/L, at least 9.8 μg/L, at least 9.9 μg/L, at least 10 μg/L, at least 10.1 μg/L, at least 10.2 μg/L, at least 10.3 μg/L, at least 10.4 μg/L, at least 10.5 μg/L, at least 10.6 μg/L, at least 10.7 μg/L, at least 10.8 μg/L, at least 10.9 μg/L, at least 11 μg/L, at least 11.1 μg/L, at least 11.2 μg/L, at least 11.3 μg/L, at least 11.4 μg/L, at least 11.5 μg/L, at least 11.6 μg/L, at least 11.7 μg/L, at least 11.8 μg/L, at least 11.9 μg/L, at least 12 μg/L, at least 12.1 μg/L, at least 12.2 μg/L, at least 12.3 μg/L, at least 12.4 μg/L, at least 12.5 μg/L, at least 12.6 μg/L, at least 12.7 μg/L, at least 12.8 μg/L, at least 12.9 μg/L, at least 13 μg/L, at least 13.1 μg/L, at least 13.2 μg/L, at least 13.3 μg/L, at least 13.4 μg/L, at least 13.5 μg/L, at least 13.6 μg/L, at least 13.7 μg/L, at least 13.8 μg/L, at least 13.9 μg/L, at least 14 μg/L, at least 14.1 μg/L, at least 14.2 μg/L, at least 14.3 μg/L, at least 14.4 μg/L, at least 14.5 μg/L, at least 14.6 μg/L, at least 14.7 μg/L, at least 14.8 μg/L, at least 14.9 μg/L, at least 15 μg/L, at least 15.1 μg/L, at least 15.2 μg/L, at least 15.3 μg/L, at least 15.4 μg/L, at least 15.5 μg/L, at least 15.6 μg/L, at least 15.7 μg/L, at least 15.8 μg/L, at least 15.9 μg/L, at least 16 μg/L, at least 16.1 μg/L, at least 16.2 μg/L, at least 16.3 μg/L, at least 16.4 μg/L, at least 16.5 μg/L, at least 16.6 μg/L, at least 16.7 μg/L, at least 16.8 μg/L, at least 16.9 μg/L, at least 17 μg/L, at least 17.1 μg/L, at least 17.2 μg/L, at least 17.3 μg/L, at least 17.4 μg/L, at least 17.5 μg/L, at least 17.6 μg/L, at least 17.7 μg/L, at least 17.8 μg/L, at least 17.9 μg/L, at least 18 μg/L, at least 18.1 μg/L, at least 18.2 μg/L, at least 18.3 μg/L, at least 18.4 μg/L, at least 18.5 μg/L, at least 18.6 μg/L, at least 18.7 μg/L, at least 18.8 μg/L, at least 18.9 μg/L, at least 19 μg/L, at least 19.1 μg/L, at least 19.2 μg/L, at least 19.3 μg/L, at least 19.4 μg/L, at least 19.5 μg/L, at least 19.6 μg/L, at least 19.7 μg/L, at least 19.8 μg/L, at least 19.9 μg/L, at least 20 μg/L, at least 25 μg/L, at least 30 μg/L, at least 35 μg/L, at least 40 μg/L, at least 45 μg/L, at least 50 μg/L, at least 55 μg/L, at least 60 μg/L, at least 65 μg/L, at least 70 μg/L, at least 75 μg/L, at least 80 μg/L, at least 85 μg/L, at least 90 μg/L, at least 95 μg/L, at least 100 μg/L, at least 105 μg/L, at least 110 μg/L, at least 115 μg/L, at least 120 μg/L, at least 125 μg/L, at least 130 μg/L, at least 135 μg/L, at least 140 μg/L, at least 145 μg/L, at least 150 μg/L, at least 155 μg/L, at least 160 μg/L, at least 165 μg/L, at least 170 μg/L, at least 175 μg/L, at least 180 μg/L, at least 185 μg/L, at least 190 μg/L, at least 195 μg/L, at least 200 μg/L, at least 205 μg/L, at least 210 μg/L, at least 215 μg/L, at least 220 μg/L, at least 225 μg/L, at least 230 μg/L, at least 235 μg/L, at least 240 μg/L, at least 245 μg/L, at least 250 μg/L, at least 255 μg/L, at least 260 μg/L, at least 265 μg/L, at least 270 μg/L, at least 275 μg/L, at least 280 μg/L, at least 285 μg/L, at least 290 μg/L, at least 295 μg/L, at least 300 μg/L, at least 305 μg/L, at least 310 μg/L, at least 315 μg/L, at least 320 μg/L, at least 325 μg/L, at least 330 μg/L, at least 335 μg/L, at least 340 μg/L, at least 345 μg/L, at least 350 μg/L, at least 355 μg/L, at least 360 μg/L, at least 365 μg/L, at least 370 μg/L, at least 375 μg/L, at least 380 μg/L, at least 385 μg/L, at least 390 μg/L, at least 395 μg/L, at least 400 μg/L, at least 405 μg/L, at least 410 μg/L, at least 415 μg/L, at least 420 μg/L, at least 425 μg/L, at least 430 μg/L, at least 435 μg/L, at least 440 μg/L, at least 445 μg/L, at least 450 μg/L, at least 455 μg/L, at least 460 μg/L, at least 465 μg/L, at least 470 μg/L, at least 475 μg/L, at least 480 μg/L, at least 485 μg/L, at least 490 μg/L, at least 495 μg/L, at least 500 μg/L, at least 600 μg/L, at least 700 μg/L, at least 800 μg/L, at least 900 μg/L, at least 1,000 μg/L, at least 2,000 μg/L, at least 3,000 μg/L, at least 4,000 μg/L, at least 5,000 μg/L, at least 6,000 μg/L, at least 7,000 μg/L, at least 8,000 μg/L, at least 9,000 μg/L, at least 10,000 μg/L, at least 11,000 μg/L, at least 12,000 μg/L, at least 13,000 μg/L, at least 14,000 μg/L, at least 15,000 μg/L, at least 16,000 μg/L, at least 17,000 μg/L, at least 18,000 μg/L, at least 19,000 μg/L, at least 20,000 μg/L, at least 21,000 μg/L, at least 22,000 μg/L, at least 23,000 μg/L, at least 24,000 μg/L, at least 25,000 μg/L, at least 26,000 μg/L, at least 27,000 μg/L, at least 28,000 μg/L, at least 29,000 μg/L, at least 30,000 μg/L, at least 31,000 μg/L, at least 32,000 μg/L, at least 33,000 μg/L, at least 34,000 μg/L, at least 35,000 μg/L, at least 36,000 μg/L, at least 37,000 μg/L, at least 38,000 μg/L, at least 39,000 μg/L, at least 40,000 μg/L, at least 41,000 μg/L, at least 42,000 μg/L, at least 43,000 μg/L, at least 44,000 μg/L, at least 45,000 μg/L, at least 46,000 μg/L, at least 47,000 μg/L, at least 48,000 μg/L, at least 49,000 μg/L, at least 50,000 μg/L, at least 51,000 μg/L, at least 52,000 μg/L, at least 53,000 μg/L, at least 54,000 μg/L, at least 55,000 μg/L, at least 56,000 μg/L, at least 57,000 μg/L, at least 58,000 μg/L, at least 59,000 μg/L, at least 60,000 μg/L, at least 61,000 μg/L, at least 62,000 μg/L, at least 63,000 μg/L, at least 64,000 μg/L, at least 65,000 μg/L, at least 66,000 μg/L, at least 67,000 μg/L, at least 68,000 μg/L, at least 69,000 μg/L, at least 70,000 μg/L, at least 71,000 μg/L, at least 72,000 μg/L, at least 73,000 μg/L, at least 74,000 μg/L, at least 75,000 μg/L, at least 76,000 μg/L, at least 77,000 μg/L, at least 78,000 μg/L, at least 79,000 μg/L, at least 80,000 μg/L, at least 81,000 μg/L, at least 82,000 μg/L, at least 83,000 μg/L, at least 84,000 μg/L, at least 85,000 μg/L, at least 86,000 μg/L, at least 87,000 μg/L, at least 88,000 μg/L, at least 89,000 μg/L, at least 90,000 μg/L, at least 91,000 μg/L, at least 92,000 μg/L, at least 93,000 μg/L, at least 94,000 μg/L, at least 95,000 μg/L, at least 96,000 μg/L, at least 97,000 μg/L, at least 98,000 μg/L, at least 99,000 μg/L, at least 100,000 μg/L, at least 105,000 μg/L, at least 110,000 μg/L, at least 115,000 μg/L, at least 120,000 μg/L, at least 125,000 μg/L, at least 130,000 μg/L, at least 135,000 μg/L, at least 140,000 μg/L, at least 145,000 μg/L, at least 150,000 μg/L, at least 155,000 μg/L, at least 160,000 μg/L, at least 165,000 μg/L, at least 170,000 μg/L, at least 175,000 μg/L, at least 180,000 μg/L, at least 185,000 μg/L, at least 190,000 μg/L, at least 195,000 μg/L, at least 200,000 μg/L, at least 205,000 μg/L, at least 210,000 μg/L, at least 215,000 μg/L, at least 220,000 μg/L, at least 225,000 μg/L, at least 230,000 μg/L, at least 235,000 μg/L, at least 240,000 μg/L, at least 245,000 μg/L, at least 250,000 μg/L, at least 255,000 μg/L, at least 260,000 μg/L, at least 265,000 μg/L, at least 270,000 μg/L, at least 275,000 μg/L, at least 280,000 μg/L, at least 285,000 μg/L, at least 290,000 μg/L, at least 295,000 μg/L, at least 300,000 μg/L, at least 305,000 μg/L, at least 310,000 μg/L, at least 315,000 μg/L, at least 320,000 μg/L, at least 325,000 μg/L, at least 330,000 μg/L, at least 335,000 μg/L, at least 340,000 μg/L, at least 345,000 μg/L, at least 350,000 μg/L, at least 355,000 μg/L, at least 360,000 μg/L, at least 365,000 μg/L, at least 370,000 μg/L, at least 375,000 μg/L, at least 380,000 μg/L, at least 385,000 μg/L, at least 390,000 μg/L, at least 395,000 μg/L, at least 400,000 μg/L, at least 405,000 μg/L, at least 410,000 μg/L, at least 415,000 μg/L, at least 420,000 μg/L, at least 425,000 μg/L, at least 430,000 μg/L, at least 435,000 μg/L, at least 440,000 μg/L, at least 445,000 μg/L, at least 450,000 μg/L, at least 455,000 μg/L, at least 460,000 μg/L, at least 465,000 μg/L, at least 470,000 μg/L, at least 475,000 μg/L, at least 480,000 μg/L, at least 485,000 μg/L, at least 490,000 μg/L, at least 495,000 μg/L, at least 500,000 μg/L, at least 600,000 μg/L, at least 700,000 μg/L, at least 800,000 μg/L, at least 900,000 μg/L, or at least 1,000,000 μg/L, including all values in between, of a product described herein. In some embodiments, a product is a compound of Formula (9) (e.g., the compound of Formula (9a)). In some embodiments, a product is a compound of Formula (10) (e.g., the compound of Formula (10a)). In some embodiments, a product is a compound of Formula (11) (e.g., the compound of Formula (11a)).

[0237] In some embodiments, a TS or a host cell associated with the disclosure may be capable of producing more of an amount of one or more products than produced by a control (e.g., a positive control). In some embodiments, a TS or a host cell associated with the disclosure may be capable of producing at least 0.05% (e.g., at least 0.075%, at least 0.1%, at least 0.5%, at least 0.75%, at least 1%, at least 5%, at least 10%, at least 15%, at least 20%, at least 25%, at least 30%, at least 35%, at least 40%, at least 45%, at least 50%, at least 55%, at least 60%, at least 65%, at least 70%, at least 75%, at least 80%, at least 85%, at least 90%, at least 95%, at least 100%, at least 125%, at least 150%, at least 175%, at least 200%, at least 300/o, at least 400%, at least 500%, at least 600%, at least 700%, at least 800%, at least 900%, or at least 1,000%) of the amount of one or more products produced by a control (e.g., such as a positive control). In some embodiments, a product is THCA, THCVA, CBDA, CBDVA, CBCA and/or CBCVA. In some embodiments, a TS or a host cell associated with the disclosure may be capable of producing at least 0.05% (e.g., at least 0.075%, at least 0.1%, at least 0.5%, at least 0.75%, at least 1%, at least 5%, at least 10%, at least 15%, at least 20%, at least 25%, at least 30%, at least 35%, at least 40%, at least 45%, at least 50%, at least 55%, at least 60%, at least 65%, at least 70%, at least 75%, at least 80%, at least 85%, at least 90%, at least 95%, at least 100%, at least 125%, at least 150%, at least 175%, at least 200%, at least 300%, at least 400%, at least 500%, at least 600%, at least 700%, at least 800%, at least 900%, or at least 1,000%) more of one or more products produced by a control (e.g., such as a positive control). In some embodiments, a product is a compound of Formula (9) (e.g., the compound of Formula (9a)). In some embodiments, a product is a compound of Formula (10) (e.g., the compound of Formula (10a)). In some embodiments, a product is a compound of Formula (11) (e.g., the compound of Formula (11a)).

[0238] In some embodiments, a TS or a host cell associated with the disclosure may be capable of producing at least 0.05% (e.g., at least 0.075%, at least 0.10%, at least 0.5%, at least 0.75%, at least 1%, at least 5%, at least 10%, at least 15%, at least 20%, at least 25%, at least 30%, at least 35%, at least 40%, at least 45%, at least 50%, at least 55%, at least 60%, at least 65%, at least 70%, at least 75%, at least 80%, at least 85%, at least 90%, at least 95%, at least 100%, at least 125%, at least 150%, at least 175%, at least 200%, at least 300%, at least 400%, at least 500%, at least 600%, at least 700%, at least 800%, at least 900%, or at least 1,000%) of the titer or yield one or more products produced by a control (e.g., such as a positive control). In some embodiments, a product is THCA, THCVA, CBDA, CBDVA, CBCA and/or CBCVA. In some embodiments, a TS or a host cell associated with the disclosure may be capable of producing at least 0.05% (e.g., at least 0.075%, at least 0.1%, at least 0.5%, at least 0.75%, at least 1%, at least 5%, at least 10%, at least 15%, at least 20%, at least 25%, at least 30%, at least 35%, at least 40%, at least 45%, at least 50%, at least 55%, at least 60%, at least 65%, at least 70%, at least 75%, at least 80%, at least 85%, at least 90%, at least 95%, at least 1⁰⁰⁰, at least 125%, at least 150%, at least 175%, at least 200%, at least 300%, at least 400%, at least 5000, at least 600%, at least 700%, at least 800%, at least 900%, or at least 1,000%) higher titer or yield of one or more products as compared to a control (e.g., such as a positive control). In some embodiments, a product is a compound of Formula (9) (e.g., the compound of Formula (9a)). In some embodiments, a product is a compound of Formula (10) (e.g., the compound of Formula (10a)). In some embodiments, a product is a compound of Formula (11) (e.g., the compound of Formula (11a)).

[0239] In some embodiments, a TS or host cell associated with the disclosure may be capable of producing one or more products at a rate that is at least 0.05% (e.g., at least 0.075%, at least 0.1%, at least 0.5%, at least 0.75%, at least 1%, at least 5%, at least 10%, at least 15%, at least 20%, at least 25%, at least 30%, at least 35%, at least 40%, at least 45%, at least 50%, at least 55%, at least 60%, at least 65%, at least 70%, at least 75%, at least 80%, at least 85%, at least 90%, at least 95%, at least 100%, at least 125%, at least 150%, at least 175%, at least 200%, at least 300%, at least 400%, at least 500%, at least 600%, at least 700%, at least 800%, at least 900%, or at least 1,000%) the rate of a control (e.g., such as a positive control). In some embodiments, a product is THCA, THCVA, CBDA, CBDVA, CBCA and/or CBCVA. In some embodiments, a TS or host cell associated with the disclosure may be capable of producing one or more products at a rate that is at least 0.05% (e.g., at least 0.075%, at least 0.1%, at least 0.5%, at least 0.75%, at least 1%, at least 5%, at least 10%, at least 15%, at least 20%, at least 25%, at least 30%, at least 35%, at least 40%, at least 45%, at least 50%, at least 55%, at least 60%6, at least 65%, at least 70%, at least 75%, at least 80%, at least 85%, at least 90%, at least 95%, at least 100%, at least 125%, at least 150%, at least 175%, at least 200%, at least 300%, at least 400%, at least 500%, at least 600%, at least 700%, at least 800%, at least 900%, or at least 1,000%) faster relative to a control (e.g., such as a positive control). In some embodiments, a product is a compound of Formula (9) (e.g., the compound of Formula (9a)). In some embodiments, a product is a compound of Formula (10) (e.g., the compound of Formula (10a)). In some embodiments, a product is a compound of Formula (11) (e.g., the compound of Formula (11a)).

[0240] In some embodiments, a TS or host cell associated with the disclosure may be capable of producing less of an amount of one or more products than produced by a control (e.g., a positive control). In some embodiments, a TS or host cell associated with the disclosure may be capable of producing at least 0.05% (e.g., at least 0.075%, at least 0.1%, at least 0.5%, at least 0.75%, at least 1%, at least 5%, at least 10%, at least 15%, at least 20%, at least 25%, at least 30%, at least 35%, at least 40%, at least 45%, at least 50%, at least 55%, at least 60%, at least 65%, at least 70%, at least 75%, at least 80%, at least 85%, at least 90%, at least 95%, at least 100%, at least 125%, at least 150%, at least 175%, at least 200%, at least 300%, at least 400%, at least 500%, at least 600%, at least 700%, at least 800%, at least 900%, or at least 1,000%) less of one or more products relative to a control (e.g., such as a positive control). In some embodiments, a product is a compound of Formula (9) (e.g., the compound of Formula (9a)). In some embodiments, a product is a compound of Formula (10) (e.g., the compound of Formula (10a)). In some embodiments, a product is a compound of Formula (11) (e.g., the compound of Formula (11a)). In some embodiments, a product is THCA, THCVA, CBDA, CBDVA, CBCA and/or CBCVA.

[0241] In some embodiments, a TS or host cell associated with the disclosure may be capable of producing at least 0.05% (e.g., at least 0.075%, at least 0.1%, at least 0.5%, at least 0.75%, at least 1%, at least 5%, at least 10%, at least 15%, at least 20%, at least 25%, at least 30%, at least 35%, at least 40%, at least 45%, at least 50%, at least 55%, at least 60%, at least 65%, at least 70%, at least 75%, at least 80%, at least 85%, at least 90%, at least 95%, at least 100%, at least 125%, at least 150%, at least 175%, at least 200%, at least 300%, at least 400%, at least 500%, at least 600%, at least 700%, at least 800%, at least 900%, or at least 1,000%) lower titer or yield of one or more products relative to a control (e.g., such as a positive control). In some embodiments, a product is a compound of Formula (9) (e.g., the compound of Formula (9a)). In some embodiments, a product is a compound of Formula (10) (e.g., the compound of Formula (10a)). In some embodiments, a product is a compound of Formula (11) (e.g., the compound of Formula (11a)).

[0242] In some embodiments, a TS or host cell associated with the disclosure may be capable of producing one or more products at a rate that is at least 0.05% (e.g., at least 0.075%, at least 0.1%, at least 0.5%, at least 0.75%, at least 1%, at least 5%, at least 10%, at least 15%, at least 20%, at least 25%, at least 30%, at least 35%, at least 40%, at least 45%, at least 50%, at least 55%, at least 60%, at least 65%, at least 70%, at least 75%, at least 80%, at least 85%, at least 90%, at least 95%, at least 100%, at least 125%, at least 150%, at least 175%, at least 200%, at least 300%, at least 400%, at least 500%, at least 600%, at least 700%, at least 800%, at least 900%, or at least 1,000%) slower relative to a control (e.g., such as a positive control). In some embodiments, a product is a compound of Formula (9) (e.g., the compound of Formula (9a)). In some embodiments, a product is a compound of Formula (10) (e.g., the compound of Formula (10a)). In some embodiments, a product is a compound of Formula (11) (e.g., the compound of Formula (11a)).

[0243] In some embodiments of methods described herein involving comparison of an experimental TS to a control, the control is a wild-type reference TS. In some embodiments, the control is a wild-type C. sativa THCAS (e.g., comprising SEQ ID NO: 21 or SEQ ID NO: 284 and optionally one or more signal sequences set forth in Table 2), or a wild-type C. sativa CBDAS (e.g. comprising SEQ ID NO: 136 and optionally one or more signal sequences set forth in Table 2). In some embodiments, the control TS is identical to an experimental TS except for the presence of one or more amino acid substitutions, insertions, or deletions within the experimental TS.

[0244] In some embodiments of methods described herein involving comparison of an experimental host cell to a control host cell, the control host cell is a host cell that does not comprise a heterologous polynucleotide encoding a TS. In some embodiments, a control host cell is a wild type cell. In some embodiments, a control host cell is a host cell that comprises a heterologous polynucleotide encoding a wild-type C. sativa THCAS. In some embodiments, the control is a wild-type C. Saliva THCAS that also exhibits CBCAS activity in addition to THCAS activity. In Cannabis, the wild-type CsTHCAS is secreted into glandular trichomes. However, as described in further detail below, it may be desirable to control the localization of a cannabinoid produced by the recombinant host cell, for example to a particular cellular compartment and/or the cellular secretory pathway. Accordingly, in some embodiments, the control is a wild-type C. sativa THCAS, that also exhibits CBCAS activity, in which the native signal sequence has been removed (e.g., as set forth in SEQ ID NO: 21) and, optionally, replaced with one or more heterologous signal sequences. In some embodiments, a control host cell is a host cell that comprises a heterologous polynucleotide comprising SEQ ID NO: 22. In some embodiments, a control host cell is a host cell that comprises a heterologous polynucleotide encoding SEQ ID NO: 284 and optionally one or more signal sequences set forth in Table 2. In some embodiments, a control host cell is a host cell that comprises a heterologous polynucleotide encoding SEQ ID NO: 136 and optionally one or more signal sequences set forth in Table 2. In some embodiments, a control host cell is genetically identical to an experimental host cell except for the presence of one or more amino acid substitutions, insertions, or deletions within a TS that is heterologously exressed in the experimental host cell.

[0245] In some embodiments, a TS is capable of producing a mixture of products. For example, the mixture may comprise one or more compounds of Formula (10). In some embodiments, the mixture comprises a compound of Formula (9), Formula (10), and/or Formula (11). In some embodiments, at least approximately 50-100%, at least approximately 50-60%, at least approximately 60-70%, at least approximately 70-80/a, at least approximately 80-90%, at least approximately 90-100%, of compounds within the product mixture are compounds of Formula (10a). In some embodiments, a TS is capable of producing at least 1.1 times, 1.2 times, 1.3 times, 1.4 times, 1.5 times, 1.6 times, 1.7 times, 1.8 times, 1.9 times, 2 times, 2.1 times, 2.2 times, 2.3 times, 2.4 times, 2.5 times, 2.6 times, 2.7 times, 2.8 times, 2.9 times, 3 times, 3.1 times, 3.2 times, 3.3 times, 3.4 times, 3.5 times, 3.6 times, 3.7 times, 3.8 times, 3.9 times, 4 times, 5 times, 6 times, 8 times, 9 times, 10 times, 20 times, 30 times, 40 times, 50 times, 60 times, 70 times, 80 times, 90 times, 100 times, 200 times, 300 times, 400 times, 500 times, 600 times, 700 times, 800 times or 1,000 times more of a compound of Formula (10a) than another compound of Formula (10). In some embodiments, a TS is capable of producing at least 1.1 times, 1.2 times, 1.3 times, 1.4 times, 1.5 times, 1.6 times, 1.7 times, 1.8 times, 1.9 times, 2 times, 2.1 times, 2.2 times, 2.3 times, 2.4 times, 2.5 times, 2.6 times, 2.7 times, 2.8 times, 2.9 times, 3 times, 3.1 times, 3.2 times, 3.3 times, 3.4 times, 3.5 times, 3.6 times, 3.7 times, 3.8 times, 3.9 times, 4 times, 5 times, 6 times, 8 times, 9 times, 10 times, 20 times, 30 times, 40 times, 50 times, 60 times, 70 times, 80 times, 90 times, 100 times, 200 times, 300 times, 400 times, 500 times, 600 times, 700 times, 800 times or 1,000 times less of a compound of Formula (10a) than another compound of Formula (10).

[0246] In some embodiments, at least approximately 50-100%, at least approximately 50-60%, at least approximately 60-70%, at least approximately 70-80%, at least approximately 80-90%, at least approximately 90-100%, of compounds within the product mixture are compounds of Formula (9a). In some embodiments, a TS is capable of producing at least 1.1 times, 1.2 times, 1.3 times, 1.4 times, 1.5 times, 1.6 times, 1.7 times, 1.8 times, 1.9 times, 2 times, 2.1 times, 2.2 times, 2.3 times, 2.4 times, 2.5 times, 2.6 times, 2.7 times, 2.8 times, 2.9 times, 3 times, 3.1 times, 3.2 times, 3.3 times, 3.4 times, 3.5 times, 3.6 times, 3.7 times, 3.8 times, 3.9 times, 4 times, 5 times, 6 times, 8 times, 9 times, 10 times, 20 times, 30 times, 40 times, 50 times, 60 times, 70 times, 80 times, 90 times, 100 times, 200 times, 300 times, 400 times, 500 times, 600 times, 700 times, 800 times or 1,000 times more of a compound of Formula (9a) than another compound of Formula (9). In some embodiments, a TS is capable of producing at least 1.1 times, 1.2 times, 1.3 times, 1.4 times, 1.5 times, 1.6 times, 1.7 times, 1.8 times, 1.9 times, 2 times, 2.1 times, 2.2 times, 2.3 times, 2.4 times, 2.5 times, 2.6 times, 2.7 times, 2.8 times, 2.9 times, 3 times, 3.1 times, 3.2 times, 3.3 times, 3.4 times, 3.5 times, 3.6 times, 3.7 times, 3.8 times, 3.9 times, 4 times, 5 times, 6 times, 8 times, 9 times, 10 times, 20 times, 30 times, 40 times, 50 times, 60 times, 70 times, 80 times, 90 times, 100 times, 200 times, 300 times, 400 times, 500 times, 600 times, 700 times, 800 times or 1,000 times less of a compound of Formula (9a) than another compound of Formula (9).

[0247] In some embodiments, at least approximately 50-100/o, at least approximately 50-60%, at least approximately 60-70%, at least approximately 70-80%, at least approximately 80-90%, at least approximately 90-100%, of compounds within the product mixture are compounds of Formula (11a). In some embodiments, a TS is capable of producing at least 1.1 times, 1.2 times, 1.3 times, 1.4 times, 1.5 times, 1.6 times, 1.7 times, 1.8 times, 1.9 times, 2 times, 2.1 times, 2.2 times, 2.3 times, 2.4 times, 2.5 times, 2.6 times, 2.7 times, 2.8 times, 2.9 times, 3 times, 3.1 times, 3.2 times, 3.3 times, 3.4 times, 3.5 times, 3.6 times, 3.7 times, 3.8 times, 3.9 times, 4 times, 5 times, 6 times, 8 times, 9 times, 10 times, 20 times, 30 times, 40 times, 50 times, 60 times, 70 times, 80 times, 90 times, 100 times, 200 times, 300 times, 400 times, 500 times, 600 times, 700 times, 800 times or 1,000 times more of a compound of Formula (11a) than another compound of Formula (11). In some embodiments, a TS is capable of producing at least 1.1 times, 1.2 times, 1.3 times, 1.4 times, 1.5 times, 1.6 times, 1.7 times, 1.8 times, 1.9 times, 2 times, 2.1 times, 2.2 times, 2.3 times, 2.4 times, 2.5 times, 2.6 times, 2.7 times, 2.8 times, 2.9 times, 3 times, 3.1 times, 3.2 times, 3.3 times, 3.4 times, 3.5 times, 3.6 times, 3.7 times, 3.8 times, 3.9 times, 4 times, 5 times, 6 times, 8 times, 9 times, 10 times, 20 times, 30 times, 40 times, 50 times, 60 times, 70 times, 80 times, 90 times, 100 times, 200 times, 300 times, 400 times, 500 times, 600 times, 700 times, 800 times or 1,000 times less of a compound of Formula (1l a) than another compound of Formula (11).

[0248] c. Signal Peptides

[0249] Any of the enzymes described in this application, including TSs, may comprise a signal peptide. Signal peptides, also referred to as “signal sequences,” generally comprise approximately 15-30 amino acids and are involved in regulating trafficking of a newly translated protein to a particular cellular compartment and/or the cellular secretory pathway.

[0250] In some instances, a signal peptide promotes localization of an enzyme of interest. A non-limiting example of a signal peptide that promotes localization of an enzyme of interest in intracellular spaces is the MFalpha2 signal peptide. See, e.g., the signal sequence from UniProtKB—U3N2M0 (residues 1-19) and Singh et al., Nucleic Acids Res. (1983) June 25; 11(12): 4049-4063. In other instances, a signal peptide is capable of preventing a protein from being secreted from the endoplasmic reticulum (ER) and/or is capable of facilitating the return of such a protein if it is inadvertently exported. Such a signal peptide may be referred to as an “ER retentional signal.” A non-limiting example of a signal peptide that is capable of preventing a protein from being secreted from the ER and/or is capable of facilitating the return of such a protein if it is inadvertently exported is an HDEL signal peptide. See, e.g., Pelham et al., EMBO J(1988)7:1757-1762.

[0251] Non-limiting examples of signal peptides include those listed in Table 2 below. As one of ordinary skill in the art would appreciate, other signal peptides known in the art would also be compatible with aspects of the disclosure. A signal peptide may be located N-terminal or C-terminal relative to a sequence encoding an enzyme of interest. A sequence encoding an enzyme of interest may be linked to two or more signal peptides. In some embodiments, an enzyme of interest may be linked to one or more signal peptides at the N-terminus and one or more signal peptides at the C-terminus. For example, in some embodiments, the MFalpha2 signal peptide may be located N-terminal to a sequence encoding an enzyme of interest and/or the HDEL signal peptide may be located C-terminal to a sequence encoding an enzyme of interest. In other embodiments, the HDEL signal peptide may be located N-terminal to a sequence encoding an enzyme of interest and/or the MFalpha2 signal peptide may be located C-terminal to a sequence encoding an enzyme of interest.

[0252] Without wishing to be bound by any theory, it is believed that an enzyme, such as a TS enzyme, linked to the MFalpha2 signal peptide and/or the HDEL signal peptide will be localized to intracellular locations associated with the secretory pathway, such as the ER and/or the Golgi apparatus. One or more of the conditions of the secretory pathway are believed to contribute to improved activity of TS enzymes derived from C. sativa. For example, the ER and Golgi apparatus are oxidative environments, which may assist in the formation of disulphide bridges. Without wishing to be bound by any theory, signal peptides and the resulting intracellular localization of proteins containing the signal peptides may differentially impact the stability and/or half-life of proteins.

[0253] In some embodiments, a signal peptide comprises a nucleic acid or protein sequence that is at least 5%, at least 10%, at least 15%, at least 20%, at least 25%, at least 30%, at least 35%, at least 40%, at least 45%, at least 50%, at least 55%, at least 60%, at least 65%, at least 70%, at least 71%, at least 72%, at least 73%, at least 74%, at least 75%, at least 76%, at least 77%, at least 78%, at least 79%, at least 80%, at least 81%, at least 82%, at least 83%, at least 84%, at least 85%, at least 86%, at least 87%, at least 88%, at least 89%, at least 90%, at least 91%, at least 92%, at least 93%, at least 94%, at least 95%, at least 96%, at least 97%, at least 98%, at least 99%, or is 100% identical, including all values in between, to one or more of SEQ ID NOs: 3-4, 16-19, 35, 44, 135, 314-319, and 607-637.

[0254] In some embodiments, a signal peptide comprises a sequence that differs by no more than 1, 2, 3, 4, 5, 6, 7, 8, 9, 10, 11, 12, 13, 14, 15, 16, 17, or 18 amino acids from any of SEQ ID NOs: 3, 4, or 16. In some embodiments, a signal peptide comprises no more than 1, 2, 3, 4, 5, 6, 7, 8, 9, 10, 11, 12, 13, 14, 15, 16, 17, or 18 amino acid substitutions, insertions, additions, or deletions relative to the sequence of SEQ ID NOs: 3, 4, or 16. In some embodiments, a signal peptide comprises SEQ ID NO: 16 or a sequence that has no more than 2 amino acid substitutions, insertions, additions, or deletions relative to the sequence of SEQ ID NO: 16. In some embodiments, a signal peptide comprises a protein sequence that differs by no more than 1, 2 or 3 amino acids from SEQ ID NO: 17. In some embodiments, a signal peptide comprises SEQ ID NO: 17 or a sequence that has no more than one amino acid substitution, insertion, addition, or deletion relative to the sequence of SEQ ID NO: 17.

[0255] A signal peptide that is located at the N-terminus of a sequence encoding an enzyme of interest may comprise a methionine at the N-terminus of the signal peptide. In some embodiments, a methionine is added to a signal peptide if the signal peptide will be located at the N-terminus of a sequence encoding an enzyme of interest. In some embodiments, a signal peptide that is normally associated with an enzyme of interest (e.g., a naturally occurring signal peptide that is present in a naturally occurring enzyme of interest) may be removed or replaced with one or more different signal peptides that are suitable for targeting the enzyme to a particular cellular compartment in a host cell of interest.

TABLE 2
Non-limiting examples of signal peptides

| | Amino | Non-limiting examples |
|---|---|---|
| | acid | of corresponding |
| Name | sequence | nucleic acid sequences |
| C. | NCSAFSFWF | aattgctcagcattttccttttggtt |
| sativa | VCKIIFFFL | tgtttgcaaaataatatttttctttc |
| THCAS | SFNIQISIA | tctcattcaatatccaaatttcaata |
| native | (SEQ ID | (SEQ ID NO: 3) |
| signal | NO: 4) | |
| peptide | | |
| C. | NCSAFSFWF | aactgcagcgcgtttagcttttggtt |
| sativa | VCKIIFFFL | tgtgtgcaaaattatttttttttttc |
| THCAS | SFHIQISIA | tgagctttcatattcagattagcatt |
| native | (SEQ ID | gcg |
| signal | NO: 317) | (SEQ ID NO: 135) |
| peptide | | aattgctcagcattttccttctggtt |
| | | cgtctgtaagattatctttttctttc |
| | | tttctttccacatacaaatctcgatt |
| | | gccaa |
| | | (SEQ ID NO: 316) |
| C. | NCSTFSFWF | aattgctcaacattctccttttggtt |
| sativa | VCKIIFFFL | tgtttgcaaaataatatttttctttc |
| THCAS | SFNIQISIA | tctcattcaatatccaa atttcaat |
| native | (SEQ ID | agct |
| signal | NO: 319) | (SEQ ID NO: 318) |
| peptide | | |
| C. | KCSTFSFWF | aaatgcagcacctttagcttttggtt |
| sativa | VCKIIFFFF | tgtgtgcaaaattatttttttttttt |
| CBDAS | SFNIQTSIA | ttagctttaacattcagaccagcatt |
| native | (SEQ ID | gcg |
| signal | NO: 315) | (SEQ ID NO: 44) |
| peptide | | aagtgctcaacattctccttttggtt |
| | | tgtttgcaagataatatttttctttt |
| | | tctcattcaatatccaaacttccatt |
| | | gct |
| | | (SEQ ID NO: 314) |
| MFalpha2 | KFISTFLTF | aagtttatcagtaccttcttgacctt |
| | ILAAVSVTA | tatcttggccgctgtctccgtaaccg |
| | (SEQ ID | ct |
| | NO: 16) | (SEQ ID NO: 18) |
| | | aaattcatttctacctttctcacttt |
| | | tattttagcggccgtttctgtcactg |
| | | ct |
| | | (SEQ ID NO: 35) |
| HDEL | HDEL | catgatgaatta |
| | (SEQ ID | (SEQ ID NO: 19) |
| | NO: 17) | cacgatgaattg |
| | | (SEQ ID NO: 607) |
| YLR120C | KLKTVRSAV | aaactgaaaactgtaagatctgcggt |
| native | LSSLFASQV | cctttcgtcactctttgcatcgcagg |
| signal | LG | ttctcggt |
| peptide | (SEQ ID | (SEQ ID NO: 609) |
| | NO: 608) | |
| Osm1p | IRSVRRVFI | attagatctgtgagaagggttttcat |
| native | YVSIFVLII | ttacgtctcaatattcgtattgataa |
| leader | VLKRTLSGT | tagttttgaaaagaacattaagtggc |
| peptide | DQTS | acagatcaaacgtca |
| | (SEQ ID | (SEQ ID NO: 611) |
| | NO: 610) | |
| Sf | IRLTVFLTA | atcagattgaccgttttcttgaccgc |
| leader | VFAAVASC | tgtttttgctgctgttgcttcttgt |
| peptide | (SEQ ID | (SEQ ID NO: 613) |
| | NO: 612) | |
| Ost1 | RQVWFSWIV | aggcaggtttggttctcttggattgt |
| leader | GLFLCFFNV | gggattgttcctatgttttttcaacg |
| peptide | SSA | tgtcttctgct |
| | (SEQ ID | (SEQ ID NO: 615) |
| | NO: 614) | |
| YDR456W | LSKVLLNIA | ctatccaaggtattgctgaatatagc |
| native | FKVLLTTAK | tttcaaggtgctgttaaccaccgcca |
| signal | R | agaga |
| peptide | (SEQ ID | (SEQ ID NO: 617) |
| | NO: 616) | |
| YNL121C | KSFITRNKT | aagagcttcattacaaggaacaagac |
| native | AILATVAAT | agccattttggcaaccgttgctgcta |
| signal | GTAIG | caggtactgccatcggt |
| peptide | (SEQ ID | (SEQ ID NO: 619) |
| | NO: 618) | |
| OSM1- | IRSVRRVFI | attagatctgtgagaagggttttcat |
| leader | YVSIFVLII | ttacgtctcaatattcgtattgataa |
| peptide | VLKRLLLGT | tagttttgaaaagattattattgggc |
| T23L, | DQTS | acagatcaaacgtca |
| S25L | (SEQ ID | (SEQ ID NO: 621) |
| | NO: 620) | |
| ERG11 | SATKSIVGE | tctgctaccaagtcaatcgttggaga |
| leader | ALEYVNIGL | ggcattggaatacgtaaacattggtt |
| peptide | SHFLALPLA | taagtcatttcttggctttaccattg |
| | QRISLIIII | gcccaaagaatctctttgatcataat |
| | PFIYNIVWQ | aattcctttcatttacaatattgtat |
| | LLYSLRKDR | ggcaattactatattctttgagaaag |
| | PP | gaccgtccacct |
| | (SEQ ID | (SEQ ID NO: 623) |
| | NO: 622) | |
| PRC1 | KAFTSLLCG | aaagcattcaccagtttactatgtgg |
| signal | LGLSTTLAK | actaggcctgtccactacactcgcta |
| peptide | AISLQRPLG | aggccatctcattgcaaagaccgttg |
| (1-111) | LDKDVLLQA | ggtctagataaggacgttttgctgca |
| | AEKFGLDLD | agctgcggaaaaatttggtttggacc |
| | LDHLLKELD | tcgacctggatcatctcttgaaggag |
| | SNVLDAWAQ | ttggactccaatgtattggacgcttg |
| | IEHLYPNQV | ggcccaaatagagcatttgtacccaa |
| | MSLETSTKP | accaggttatgagccttgaaacttcc |
| | KFPEAIKTK | actaagccaaaattccctgaagcaat |
| | KDWDFVVKN | caaaacgaagaaagactgggactttg |
| | DAIENYQLR | tggtcaagaatgacgcaattgaaaac |
| | VN | tatcagcttcgtgtcaac |
| | (SEQ ID | (SEQ ID NO: 625) |
| | NO: 624) | |
| PEP4 | FSLKALLPL | Ttcagcttgaaagcattattgccatt |
| signal | ALLLVSANQ | ggccttgttgttggtcagcgccaacc |
| peptide | VAAKV | aagttgctgcaaaagtc |
| (1-24) | (SEQ ID | (SEQ ID NO: 627) |
| | NO: 626) | |
| PEP4 | FSLKALLPL | ttcagcttgaaagcattattgccatt |
| signal | ALLLVSANQ | ggccttgttgttggtcagcgccaacc |
| peptide | VAAKVHKAK | aagttgctgcaaaagtccacaaggct |
| (2-76) | IYKHELSDE | aaaatttataaacacgagttgtccga |
| | MKEVTFEQH | tgagatgaaagaagtcactttcgagc |
| | LAHLGQKYL | aacatttagctcatttaggccaaaag |
| | TQFEKANPE | tacttgactcaatttgagaaagctaa |
| | VVFSREHPF | ccccgaagttgttttttctagggagc |
| | FTE | atcctttcttcactgaa |
| | (SEQ ID | (SEQ ID NO: 629) |
| | NO: 628) | |
| KLD | KLD | aagctggac |
| | (SEQ ID | (SEQ ID NO: 631) |
| | NO: 630) | |
| Tail | MVYIGIAIF | atggtttatattggtatcgctatttt |
| anchor | LFLVGLFMK | tttgtttttggttggcctttttatga |
| UBC6 | (SEQ ID | aa |
| | NO: 632) | (SEQ ID NO: 633) |
| PTS1 | SKL | agcaaacta |
| signal | (SEQ ID | (SEQ ID NO: 635) |
| peptide | NO: 634) | |
| (SKL | | |
| from | | |
| C1T2) | | |
| CVIA | CVIA | tgtgttattgct |
| from | (SEQ ID | (SEQ ID NO: 637) |
| MFa1 | NO: 636) | |

[0256] In some embodiments, a TS is a tetrahydrocannabinolic acid synthase (THCAS), a cannabidiolic acid synthase (CBDAS), and/or a cannabichromenic acid synthase (CBCAS). As one of ordinary skill in the art would appreciate a TS could be obtained from any source, including naturally occurring sources and synthetic sources (e.g., a non-naturally occurring TS).

### Tetrahydrocannabinolic Acid Synthase (THCAS)

[0257] A host cell described in this application may comprise a TS that is a tetrahydrocannabinolic acid synthase (THCAS). As used in this application “tetrahydrocannabinolic acid synthase (THCAS)” or “Δ¹-tetrahydrocannabinolic acid (THCA) synthase” refers to an enzyme that is capable of catalyzing oxidative cyclization of a prenyl moiety (e.g., terpene) of a compound of Formula (8) to produce a ring-containing product (e.g., heterocyclic ring-containing product, carbocyclic-ring containing product) of Formula (10). In certain embodiments, a THCAS refers to an enzyme that is capable of producing Δ9-tetrahydrocannabinolic acid (Δ9-THCA), THCA, Δ9-Tetrahydro-cannabivannic acid A (A9-THCVA-C3 A), THCVA, THCPA, or a compound of Formula 10(a), from a compound of Formula (8). In certain embodiments, a THCAS is capable of producing Δ⁹-tetrahydrocannabinolic acid (Δ⁹-THCA, THCA, or a compound of Formula 10(a)). In certain embodiments, a THCAS is capable of producing Δ9-tetrahydrocannabivarinic acid (A9-THCVA, THCVA, or a compound of Formula 10 where R is n-propyl).

[0258] In some embodiments, a THCAS may catalyze the oxidative cyclization of substrates, such as 3-prenyl-2,4-dihydroxy-6-alkylbenzoic acids. In some embodiments, a THCAS may use cannabigerolic acid (CBGA) as a substrate. In some embodiments, the THCAS produces A9-THCA from CBGA. In some embodiments, a THCAS may catalyze the oxidative cyclization of cannabigerovarinic acid (CBGVA). In some embodiments, a THCAS exhibits specificity for CBGA substrates as compared to other substrates. In some embodiments, a THCAS may use a compound of Formula (8) of FIG. 2 where R is C4 alkyl (e.g., n-butyl) or R is C7 alkyl (e.g., n-heptyl) as a substrate. In some embodiments, a THCAS may use a compound of Formula (8) where R is C4 alkyl (e.g., n-butyl) as a substrate. In some embodiments, a THCAS may use a compound of Formula (8) of FIG. 2 where R is C7 alkyl (e.g., n-heptyl) as a substrate. In some embodiments, the THCAS exhibits specificity for substrates that can result in THCP as a product.

[0259] In some embodiments, a THCAS is from C. sativa. C. sativa THCAS performs the oxidative cyclization of the geranyl moiety of Cannabigerolic Acid (CBGA) (FIG. 4 Structure 8a) to form Tetrahydrocannabinolic Acid (FIG. 4 Structure 10a) using covalently bound flavin adenine dinucleotide (FAD) as a cofactor and molecular oxygen as the final electron acceptor. THCAS was first discovered and characterized by Taura et al. (JACS. 1995) following extraction of the enzyme from the leaf buds of C. sativa and confirmation of its THCA synthase activity in vitro upon the addition of CBGA as a substrate. A crystal structure of the enzyme published by Shoyama et al. (J Mol Biol. 2012 Oct. 12:423(1):96-105) revealed that the enzyme covalently binds to a molecule of the cofactor FAD. See also, e.g., Sirikantarams et al., J. Biol. Chem. 2004 Sep. 17; 279(38):39767-39774. There are several THCAS isozymes in C. sativa.

[0260] In some embodiments, a C. sativa THCAS (Uniprot KB Accession No.: I1V0C5) comprises the amino acid sequence shown below, in which the signal peptide is underlined and bolded:

(SEQ ID NO: 20)
MNCSAFSFWFVCKIIFFFLSFNIQISIANPQENFLKCF
SEYIPNNPANPKFIYTQHDQLYMSVLNSTIQNLRFTSDTTPKPLVIVTPS
NVSHIQASILCSKKVGLQIRTRSGGHDAEGMSYISQVPFVVVDLRNMHSI
KIDVHSQTAWVEAGATLGEVYYWINEKNENFSFPGGYCPTVGVGGHFSGG
GYGALMRNYGLAADNIIDAHLVNVDGKVLDRKSMGEDLFWAIRGGGGENF
GIIAAWKIKLVAVPSKSTIFSVKKNMEIHGLVKLFNKWQNIAYKYDKDLV
LMTHFITKNITDNHGKNKTTVHGYFSSIFHGGVDSLVDLMNKSFPELGIK
KTDCKEFSWIDTTIFYSGVVNFNTANFKKEILLDRSAGKKTAFSIKLDYV
KKPIPETAMVKILEKLYEEDVGVGMYVLYPYGGIMEEISESAIPFPHRAG
IMYELWYTASWEKQEDNEKHINWVRSVYNFTTPYVSQNPRLAYLNYRDLD
LGKTNPESPNNYTQARIWGEKYFGKNFNRLVKVKTKADPNNFFRNEQSIP
PLPPHHH.

[0261] In some embodiments, a THCAS comprises the sequence shown below:

(SEQ ID NO: 21)
NPQENFLKCFSEYIPNNPANPKFIYTQHDQLYMSVLNSTIQNLRFTSDTT
PKPLVIVTPSNVSHIQASILCSKKVGLQIRTRSGGHDAEGMSYISQVPFV
VVDLRNMHSIKIDVHSQTAWVEAGATLGEVYYWINEKNENFSFPGGYCPT
VGVGGHFSGGGYGALMRNYGLAADNIIDAHLVNVDGKVLDRKSMGEDLFW
AIRGGGGENFGIIAAWKIKLVAVPSKSTIFSVKKNMEIHGLVKLFNKWQN
IAYKYDKDLVLMTHFITKNITDNHGKNKTTVHGYFSSIFHGGVDSLVDLM
NKSFPELGIKKTDCKEFSWIDTTIFYSGVVNFNTANFKKEILLDRSAGKK
TAFSIKLDYVKKPIPETAMVKILEKLYEEDVGVGMYVLYPYGGIMEEISE
SAIPFPHRAGIMYELWYTASWEKQEDNEKHINWVRSVYNFTTPYVSQNPR
LAYLNYRDLDLGKTNPESPNNYTQARIWGEKYFGKNFNRLVKVKTKADPN
NFFRNEQSIPPLPPHHH.

[0262] A non-limiting example of a nucleotide sequence encoding SEQ ID NO: 21 is:

(SEQ ID NO: 22)
aacccgcaagaaaactttctaaaatgcttttctgaatacattcctaacaa
ccctgccaacccgaagtttatctacacacaacacgatcaattgtatatga
gcgtgttgaatagtacaatacagaacctgaggtttacatccgacacaacg
ccgaaaccgctagtgatcgtcacaccctccaacgtaagccacattcaggc
aagcattttatgcagcaagaaagtcggactgcagataaggacgaggtccg
gaggacacgacgccgaagggatgagctatatctcccaggtaccttttgtg
gtggtagacttgagaaatatgcactctatcaagatagacgttcactccca
aaccgcttgggttgaggcgggagccacccttggtgaggtctactactgga
tcaacgaaaagaatgaaaattttagctttcctgggggatattgcccaact
gtaggtgttggcggccacttctcaggaggcggttatggggccttgatgcg
taactacggacttgcggccgacaacattatagacgcacatctagtgaatg
tagacggcaaagttttagacaggaagagcatgggtgaggatcttttttgg
gcaattagaggggagggggagaaaattttggaattatcgctgcttggaaa
attaagctagttgcggtaccgagcaaaagcactatattctctgtaaaaaa
gaacatggagatacatggtttggtgaagctttttaataagtggcaaaaca
tcgcgtacaagtacgacaaagatctggttctgatgacgcattttataacg
aaaaatatcaccgacaaccacggaaaaaacaaaaccacagtacatggcta
cttctctagtatatttcatgggggagtcgattctctggttgatttaatga
acaaatcattcccagagttgggtataaagaagacagactgtaaggagttc
tcttggattgacacaactatattctattcaggcgtagtcaactttaacac
ggcgaatttcaaaaaagagatccttctggacagatccgcaggtaagaaaa
ctgcgttctctatcaaattggactatgtgaagaagcctattcccgaaacc
gcgatggtcaagatacttgagaaattatacgaggaagatgtgggagttgg
aatgtacgtactttatccctatggtgggataatggaagaaatcagcgaga
gcgccattccatttccccatcgtgccggcatcatgtacgagctgtggtat
actgcgagttgggagaagcaagaagacaacgaaaagcacattaactgggt
cagatcagtttacaatttcaccaccccatacgtgtcccagaatccgcgtc
tggcttacttgaactaccgtgatcttgacctgggtaaaacgaacccggag
tcacccaacaattacactcaagctagaatctggggagagaaatactttgg
gaagaacttcaacaggttagtaaaggttaaaaccaaggcagatccaaaca
cacttttttagaaatgaacaatcattcccccgctacccccgcaccatca
c.

[0263] In some embodiments, a THCAS comprises the amino acid sequence shown below, in which signal peptides are underlined and bolded:

(SEQ ID NO: 23)
MKFISTFLTFILAAVSVTANPQENFLKCFSEYIPNNP
ANPKFIYTQHDQLYMSVLNSTIQNLRFTSDTTPKPLVIVTPSNVSHIQAS
ILCSKKVGLQIRTRSGGHDAEGMSYISQVPFVVVDLRNMHSIKIDVHSQT
AWVEAGATLGEVYYWINEKNENFSFPGGYCPTVGVGGHFSGGGYGALMRN
YGLAADNIIDAHLVNVDGKVLDRKSMGEDLFWAIRGGGGENFGIIAAWKI
KLVAVPSKSTIFSVKKNMEIHGLVKLFNKWQNIAYKYDKDLVLMTHFITK
NITDNHGKNKTTVHGYFSSIFHGGVDSLVDLMNKSFPELGIKKTDCKEFS
WIDTTIFYSGVVNFNTANFKKEILLDRSAGKKTAFSIKLDYVKKPIPETA
MVKILEKLYEEDVGVGMYVLYPYGGIMEEISESAIPFPHRAGIMYELWYT
ASWEKQEDNEKHINWVRSVYNFTTPYVSQNPRLAYLNYRDLDLGKTNPES
PNNYTQARIWGEKYFGKNFNRLVKVKTKADPNNFFRNEQSIPPLPPHHHH
DEL.

[0264] A non-limiting example of a nucleotide sequence encoding SEQ ID NO: 23, in which sequences encoding signal peptides are underlined and bolded, is shown below:

(SEQ ID NO: 24)
atgaagtttatcagtaccttcttgacctttatct
tggccgctgtctccgtaaccgctaacccgcaaga
aaactttctaaaatgcttttctgaatacattcctaacaaccctgccaacc
cgaagtttatctacacacaacacgatcaattgtatatgagcgtgttgaat
agtacaatacagaacctgaggtttacatccgacacaacgccgaaaccgct
agtgatgtcacaccctccaacgtaagccacattcaggcaagcattttatg
cagcaagaaagtcggactgcagataaggacgaggtccggaggacacgacg
ccgaagggatgagctatatctcccaggtaccttttgtggtggtagacttg
agaaatatgcactctatcaagatagacgttcactcccaaaccgcttgggt
tgaggcgggagccacccttggtgaggtctactactggatcaacgaaaaga
atgaaaattttagctttcctgggggatattgcccaactgtaggtgttggc
ggccacttctcaggaggcggttatggggccttgatgcgtaactacggact
tgcggccgacaacattatagacgcacatctagtgaatgtagacggcaaag
ttttagacaggaagagcatgggtgaggatcttttttgggcaattagaggc
ggagggggagaaaattttggaattatcgctgcttggaaaattaagctagt
tgcggtaccgagcaaaagcactatattctctgtaaaaaagaacatggaga
tacatggtttggtgaagctttttaataagtggcaaaacatcgcgtacaag
tacgacaaagatctggttctgatgacgcattttataacgaaaaatatcac
cgacaaccacggaaaaaacaaaaccacagtacatggctacttctctagta
tatttcatgggggagtcgattctctggttgatttaatgaacaaatcattc
ccagagttgggtataaagaagacagactgtaaggagttctcttggattga
cacaactatattctattcaggcgtagtcaactttaacacggcgaatttca
aaaaagagatccttctggacagatccgcaggtaagaaaactgcgttctct
atcaaattggactatgtgaagaagcctattcccgaaaccgcgatggtcaa
gatacttgagaaattatacgaggaagatgtgggagttggaatgtacgtac
tttatccctatggtgggataatggaagaaatcagcgagagcgccattcca
tttccccatcgtgccggcatcatgtacgagctgtggtatactgcgagttg
ggagaagcaagaagacaacgaaaagcacattaactgggtcagatcagttt
acaatttcaccaccccatacgtgtcccagaatccgcgtctggcttacttg
aactaccgtgatcttgacctgggtaaaacgaacccggagtcacccaacaa
ttacactcaagctagaatctggggagagaaatactttgggaagaacttca
acaggttagtaaaggttaaaaccaaggcagatccaaacaacttttttaga
aatgaacaatccattcccccgctacccccgcaccatcac
catgatgaatta.

[0265] In some embodiments, a C. sativa THCAS comprises the amino acid sequence set forth in UniProtKB—Q8GTB6 (SEQ ID NO: 14) in which the signal peptide is underlined and bolded:

(SEQ ID NO: 14)
MNCSAFSFWFVCKIIFFFLSFHIQISIA
NPRENFLKCFSKHIPNNVANPKLVYTQHDQLYMSILNSTIQNLRFISDTT
PKPLVIVTPSNNSHIQATILCSKKVGLQIRTRSGGHDAEGMSYISQVPFV
VVDLRNMHSIKIDVHSQTAWVEAGATLGEVYYWINEKNENLSFPGGYCPT
VGVGGHFSGGGYGALMRNYGLAADNIIDAHLVNVDGKVLDRKSMGEDLFW
AIRGGGGENFGIIAAWKIKLVAVPSKSTIFSVKKNMEIHGLVKLENKWQN
IAYKYDKDLVLMTHFITKNITDNHGKNKTTVHGYFSSIFHGGVDSLVDLM
NKSFPELGIKKTDCKEFSWIDTTIFYSGVVNFNTANFKKEILLDRSAGKK
TAFSIKLDYVKKPIPETAMVKILEKLYEEDVGAGMYVLYPYGGIMEEISE
SAIPFPHRAGIMYELWYTASWEKQEDNEKHINWVRSVYNFTTPYVSQNPR
LAYLNYRDLDLGKTNHASPNNYTQARIWGEKYFGKNFNRLVKVKTKVDPN
NFFRNEQSIPPLPPHHH

[0266] In some embodiments, a THCAS comprises the sequence shown below:

(SEQ ID NO: 284)
NPRENFLKCFSKHIPNNVANPKLVYTQHDQLYMSILNSTIQNLRFISDTT
PKPLVIVTPSNNSHIQATILCSKKVGLQIRTRSGGHDAEGMSYISQVPFV
VVDLRNMHSIKIDVHSQTAWVEAGATLGEVYYWINEKNENLSFPGGYCPT
VGVGGHFSGGGYGALMRNYGLAADNIIDAHLVNVDGKVLDRKSMGEDLFW
AIRGGGGENFGIIAAWKIKLVAVPSKSTIFSVKKNMEIHGLVKLFNKWQN
IAYKYDKDLVLMTHFITKNITDNHGKNKTTVHGYFSSIFHGGVDSLVDLM
NKSFPELGIKKTDCKEFSWIDTTIFYSGVVNFNTANFKKEILLDRSAGKK
TAFSIKLDYVKKPIPETAMVKILEKLYEEDVGAGMYVLYPYGGIMEEISE
SAIPFPHRAGIMYELWYTASWEKQEDNEKHINWVRSVYNFTTPYVSQNPR
LAYLNYRDLDLGKTNHASPNNYTQARIWGEKYFGKNFNRLVKVKTKVDPN
NFFRNEQSIPPLPPHHH.

[0267] A non-limiting example of a nucleic acid sequence encoding SEQ ID NO: 284 for expression in S. cerevisiae is:

(SEQ ID NO: 254)
aacccacgtgagaactttttgaaatgtttctctaagcatatccctaacaa
tgtggctaacccaaagttagtttacacacagcacgatcaactatatatga
gcattttgaactccactatccaaaatctgaggttcattagtgacaccacg
cccaaaccattggttattgtaaccccttctaataactctcatatccaagc
tactatattatgttccaagaaggtcggcttgcaaattagaactagatcag
gaggtcacgatgctgaaggtatgtcatacatttcccaagttccattcgtt
gttgtagacctaagaaatatgcactctatcaaaattgatgtccattctca
aacagcctgggtcgaagctggtgctaccttgggtgaagtttattactgga
ttaacgaaaagaatgaaaacttgtcgttcccaggtggttactgtccaacc
gtgggtgttggtggacactttagcggtggtggatacggcgccttgatgag
aaactatggtttagctgctgacaatatcatcgatgcacaccttgtcaacg
ttgatggtaaggtattggacagaaaatcaatgggtgaagacttgttctgg
gctataagaggtggcggtggtgagaactttggtatcatcgctgcatggaa
gattaagttagttgccgtcccatctaagtccactatcttcagtgttaaaa
agaacatggaaattcatggtttggtcaagctatttaataaatggcagaac
atcgcttacaagtacgataaggacttagttttgatgacccattttataac
taaaaacattactgataaccacggtaaaaataagactacagttcacggtt
atttctcctctatcttccatggtggagttgactctctggtcgacctaatg
aacaagtccttcccagaattgggtattaagaagactgattgcaaagaatt
ttcatggatcgataccaccattttctactctggcgtggttaactttaata
cggctaactttaagaaggaaatattgttagaccgttcggccggtaagaaa
accgctttttctataaagttggattatgttaagaaacctattcctgaaac
agccatggtcaagatcttagaaaaattgtacgaagaggatgtaggagctg
gtatgtacgttctttacccatatggtggtattatggaagaaatatctgag
tctgccattccattcccacatagggcaggcattatgtacgaattgtggta
tactgctagctgggaaaagcaagaagacaatgaaaaacacataaattggg
ttagaagtgtatacaatttcactaccccctacgtcagccaaaacccaaga
ttggcctatctaaactaccgtgacctggacctaggtaaaactaaccacgc
ttcaccaaacaactacacccaagctagaatctggggagagaagtatttcg
gtaagaatttcaacagattggtcaaagtgaagaccaaggtcgatccaaat
aattttttcagaaacgagcaatctattcccccattaccaccacatcatca
c

[0268] In some embodiments, a THCAS comprises each of: SEQ ID NO: 284; the MFalpha2 signal peptide; and the HDEL signal peptide. In some embodiments, such a THCAS comprises the amino acid sequence shown below, in which signal peptides are underlined and bolded:

(SEQ ID NO: 1220)
MKFISTFLTFILAAVSVTANPRENFLKCFSKHIPNNVANP
KLVYTQHDQLYMSILNSTIQNLRFISDTTPKPLVIVTPSNNSHIQATILC
SKKVGLQIRTRSGGHDAEGMSYISQVPFVVVDLRNMHSIKIDVHSQTAWV
EAGATLGEVYYWINEKNENLSFPGGYCPTVGVGGHFSGGGYGALMRNYGL
AADNIIDAHLVNVDGKVLDRKSMGEDLFWAIRGGGGENFGIIAAWKIKLV
AVPSKSTIFSVKKNMEIHGLVKLFNKWQNIAYKYDKDLVLMTHFITKNIT
DNHGKNKTTVHGYFSSIFHGGVDSLVDLMNKSFPELGIKKTDCKEFSWID
TTIFYSGVVNFNTANFKKEILLDRSAGKKTAFSIKLDYVKKPIPETAMVK
ILEKLYEEDVGAGMYVLYPYGGIMEEISESAIPFPHRAGIMYELWYTASW
EKQEDNEKHINWVRSVYNFTTPYVSQNPRLAYLNYRDLDLGKTNHASPNN
YTQARIWGEKYFGKNFNRLVKVKTKVDPNNFFRNBQSIPPLPPHHH
HDEL.

[0269] Additional non-limiting examples of THCAS enzymes may also be found in U.S. Pat. No. 9,512,391 and US Publication No. 2018/0179564, which are incorporated by reference in this application in their entireties.

[0270] In some embodiments, a THCAS comprises the amino acid sequence set forth in SEQ ID NO: 320:

(SEQ ID NO: 320)
MNCSAFSFWFVCKIIFFFLSFHIQISIANPRENFLKCF
SKHIPNNVANPKLVYTQHDQLYMSILNSTIQNLRFISDTTPKPLVIVTPS
NNSHIQATILCSKKVGLQIRTRSGGHDAEGMSYISQVPFVVVDLRNMHSI
KIDVHSQTAWVEAGATLGEVYYWINEKNENLSFPGGYCPTVGVGGHFSGG
GYGALMRNYGLAADNIIDAHLVNVDGKVLDRKSMGEDLFWAIRGGGGENF
GIIAAWKIKLVAVPSKSTIFSVKKNMEIHGLVKLFNKWQNIAYKYDKDLV
LMTHFITKNITDNHGKNKTTVHGYFSSIFHGGVDSLVDLMNKSFRELGIK
KTDCKELSWIDTTIFYSGVVNYNTANFKKEILLDRSAGKKTAFSIKLDYV
KKPIPETAMVKILEKLYEEDVGAGMYVLYPYGGIMEEISESAIPFPHRAG
IMYELWYTASWEKQEDNEKHINWVRSVYNFTTPYVSQNPRLAYLNYRDLD
LGKTNHASPNNYTQARIWGEKYFGKNFNRLVKVKTKVDPNNFFRNEQSIP
PLPPHHH.

[0271] In some embodiments, a THCAS comprises the amino acid sequence set forth in SEQ ID NO: 321:

(SEQ ID NO: 321)
NPRENFLKCFSKHIPNNVANPKLVYTQHDQLYMSILNSTIQNLRFISDTT
PKPLVIVTPSNNSHIQATILCSKKVGLQIRTRSGGHDAEGMSYISQVPFV
VVDLRNMHSIKIDVHSQTAWVEAGATLGEVYYWINEKNENLSFPGGYCPT
VGVGGHFSGGGYGALMRNYGLAADNIIDAHLVNVDGKVLDRKSMGEDLFW
AIRGGGGENFGIIAAWKIKLVAVPSKSTIFSVKKNMEIHGLVKLFNKWQN
IAYKYDKDLVLMTHFITKNITDNHGKNKTTVHGYFSSIFHGGVDSLVDLM
NKSFRELGIKKTDCKELSWIDTTIFYSGVVNYNTANFKKEILLDRSAGKK
TAFSIKLDYVKKPIPETAMVKILEKLYEEDVGAGMYVLYPYGGIMEEISE
SAIPFPHRAGIMYELWYTASWEKQEDNEKHINWVRSVYNFTTPYVSQNPR
LAYLNYRDLDLGKTNHASPNNYTQARIWGEKYFGKNFNRLVKVKTKVDPN
NFFRNEQSIPPLPPHHH

[0272] In some embodiments, a THCAS does not comprise the sequence of SEQ ID NOs: 20, 21, 22, 23, 24, 14, 284, 254, 1220, 320 or 321. In some embodiments, a control TS comprises the sequence of any one of SEQ ID NOs: 20, 21, 22, 23, 24, 14, 284, 254, 1220, 320 or 321.

[0273] As described in the Examples section, novel THCAS enzymes were identified in this disclosure that are capable of catalyzing the conversion of a compound of Formula (8) to produce a compound of Formula (10) and that can be functionally expressed in host cells. Without being bound by a particular theory, the novel THCAS enzymes disclosed in this application may be useful for engineering to alter the activity and/or abundance of the THCAS (e.g., change the product profile, substrate profile, and/or kinetics (e.g., Kcat/Vmax and/or Kd) of the TS).

[0274] In some embodiments, a THCAS comprises the amino acid sequence shown below:

(SEQ ID NO: 37)
NPRENFLKCFSKHIPNNVANPKLVYTQHDQLYMSILNSTIQNLRFISDTT
PKPLVIVTPSNNSHIQATILCSKKVGLQIRTRSGGHDAEGMSYISQVPFV
VVDLRNMHSIKIDVHSQTAWVEAGATLGEVYYWINEKNENLSFPGGYCPT
VGVGGHFSGGGYGALMRNYGLAADNIIDAHLVNVDGKVLDRKSMGEDLFW
AIRGGGGENFGIIAAWKIRLVAVPSRATIFSVKRNMEIHGLVKLFNKWQN
IAYKYDKDLLLMTHFITRNIIDNQGKNKTTVHGYFSCIFHGGVDSLVNLM
NKSYPELGIKKTDCKEFSWIDTTIFYSGVVNFNTANFKKEILLDRSAGKK
TAFSIKLDYVKKPIPETAMVKILEKLYEEDVGVGMYVLYPYGGIMEEISE
SAIPFPHRAGIMYELWYTASWEKQEDNEKHINWVRSVYNFTTPYVSQNPR
LAYLNYRDLDLGKTNPESPNNYTQARIWGEKYFGKNFNRLVKVKTKADPN
NFFRNEQSIPPLPPHHH.

[0275] A non-limiting example of a nucleic acid sequence encoding SEQ ID NO: 37 for expression in S. cerevisiae is:

(SEQ ID NO: 28)
aatcctagagaaaactttctgaaatgcttctctaaacacattcccaataa
tgttgctaatcctaaactggtatatacccaacacgatcaattgtacatgt
ctatcttgaacagcacgatacagaacttgagattcatatcagatacgaca
ccaaagcctttggttattgttacccctagtaataatagtcatatccaggc
tacaatattgtgtagtaagaaagtgggcctacaaataagaaccagatcag
gtggtcatgatgcggaaggcatgtcttatatttctcaggtaccatttgtg
gtggttgatttgagaaacatgcacagtatcaagatagacgttcacagtca
aacggcatgggtggaggcgggtgctacattaggtgaagtttattactgga
tcaacgaaaagaatgaaaatctgtctttcccaggcggctactgtcctaca
gttggcgttggcgggcatttctctggcggtggttatggagccttgatgag
aaactatggcttggccgcagataatataatcgacgctcacttggttaacg
ttgatggtaaggtccttgatagaaaatccatgggtgaagatttgttttgg
gcaattagggggggtggtggtgaaaattttggaattattgcggcctggaa
aattaggttggtagcagttccttccagggcaaccattttttctgttaaga
gaaacatggaaattcatggcctggtgaaattgtttaacaagtggcagaac
atcgcatacaagtacgataaagatttgttgttaatgacccactttattac
caggaacattattgataaccaaggtaaaaataagaccaccgtccatggat
acttttcgtgcatatttcatggtggtgttgatagtctagttaatttaatg
aacaaatcttatcctgaactagggatcaaaaaaactgattgcaaggaatt
ctcttggatagacacaacaattttttacagtggtgtcgtcaatttcaata
cagcaaattttaagaaagaaatattattagataggagtgcaggcaaaaag
acggctttttctattaaactagattatgttaagaagccaattccagagac
agcaatggtaaagatcctagagaaactatacgaagaggatgtcggagtcg
gaatgtacgttctttatccatatgggggtattatggaggagatatccgaa
agcgcaatcccatttccccatagagccggaattatgtatgaattgtggta
caccgcttcatgggagaagcaggaggataacgaaaagcacataaattggg
taaggtcagtttacaattttacaacaccatacgtctcacagaatccgaga
ttggcttatttgaactacagagacttggacctgggaaagacaaacccaga
gagcccaaacaattacactcaagcaaggatttggggtgaaaagtacttcg
gtaaaaatttcaataggctggtgaaagtcaagactaaggcggatccgaac
aacttcttcaggaacgaacaatccattccaccacttcctccacatcacca
c.

[0276] In some embodiments, a THCAS comprises each of: SEQ ID NO: 37; the MFalpha2 signal peptide; and the HDEL signal peptide. In some embodiments, such a THCAS comprises the amino acid sequence shown below, in which signal peptides are underlined and bolded:

(SEQ ID NO: 233)
MKFISTFLTFILAAVSVTANPRENFLKCFSKHIPNNVA
NPKLVYTQHDQLYMSILNSTIQNLRFISDTTPKPLVIVTPSNNSHIQATI
LCSKKVGLQIRTRSGGHDAEGMSYISQVPFVVVDLRNMHSIKIDVHSQTA
WVEAGATLGEVYYWINEKNENLSFPGGYCPTVGVGGHFSGGGYGALMRNY
GLAADNIIDAHLVNVDGKVLDRKSMGEDLFWAIRGGGGENFGIIAAWKIR
LVAVPSRATIFSVKRNMEIHGLVKLFNKWQNIAYKYDKDLLLMTHFITRN
IIDNQGKNKTTVHGYFSCIFHGGVDSLVNLMNKSYPELGIKKTDCKEFSW
IDTTIFYSGVVNFNTANFKKEILLDRSAGKKTAFSIKLDYVKKPIPETAM
VKILEKLYEEDVGVGMYVLYPYGGIMEEISESAIPFPHRAGIMYELWYTA
SWEKQEDNEKHINWVRSVYNFTTPYVSQNPRLAYLNYRDLDLGKTNPESP
NNYTQARIWGEKYFGKNFNRLVKVKTKADPNNFFRNEQSIPPLPPHHH
HDEL.

[0277] A non-limiting example of a nucleic acid sequence encoding SEQ ID NO: 233 is shown below, in which sequences encoding signal peptides are underlined and bolded:

(SEQ ID NO: 226)
atgaagtttatcagtaccttcttgacctttatcttggccgc
tgtctccgtaaccgctaatcctagagaaaactttctgaaat
gcttctctaaacacattcccaataatgttgctaatcctaaactggtatat
acccaacacgatcaattgtacatgtctatcttgaacagcacgatacagaa
cttgagattcatatcagatacgacaccaaagcctttggttattgttaccc
ctagtaataatagtcatatccaggctacaatattgtgtagtaagaaagtg
ggcctacaaataagaaccagatcaggtggtcatgatgcggaaggcatgtc
ttatatttctcaggtaccatttgtggtggttgatttgagaaacatgcaca
gtatcaagatagacgttcacagtcaaacggcatgggggaggcgggtgcta
cattaggtgaagtttattactggatcaacgaaaagaatgaaaatctgtct
ttcccaggcggctactgtcctacagttggcgttggcgggcatttctctgg
cggtggttatggagccttgatgagaaactatggcttggccgcagataata
taatcgacgctcacttggttaacgttgatggtaaggtccttgatagaaaa
tccatgggtgaagatttgttttgggcaattagggggggtggtggtgaaaa
ttttggaattattgcggcctggaaaattaggttggtagcagttccttcca
gggcaaccattttttctgttaagagaaacatggaaattcatggcctggtg
aaattgtttaacaagtggcagaacatcgcatacaagtacgataaagattt
gttgttaatgacccactttattaccaggaacattattgataaccaaggta
aaaataagaccaccgtccatggatacttttcgtgcatatttcatggtggt
gttgatagtctagttaatttaatgaacaaatcttatcctgaactagggat
caaaaaaactgattgcaaggaattctcttggatagacacaacaatttttt
acagtggtgtcgtcaatttcaatacagcaaattttaagaaagaaatatta
ttagataggagtgcaggcaaaaagacggctttttctattaaactagatta
tgttaagaagccaattccagagacagcaatggtaaagatcctagagaaac
tatacgaagaggatgtcggagtcggaatgtacgttctttatccatatggg
ggtattatggaggagatatccgaaagcgcaatcccatttccccatagagc
cggaattatgtatgaattgtggtacaccgcttcatgggagaagcaggagg
ataacgaaaagcacataaattgggtaaggtcagtttacaattttacaaca
ccatacgtctcacagaatccgagattggcttatttgaactacagagactt
ggacctgggaaagacaaacccagagagcccaaacaattacactcaagcaa
ggatttggggtgaaaagtacttcggtaaaaatttcaataggctggtgaaa
gtcaagactaaggcggatccgaacaacttcttcaggaacgaacaatccat
tccaccacttcctccacatcaccaccatgatgaatta.

[0278] In some embodiments, a THCAS comprises the amino acid sequence shown below:

(SEQ ID NO: 43)
NPRENFLKCFSKHIPNNVANPKLVYTQHDQLYMSILNSTIQNLRFISDTT
PKPLVIVTPSNNSHIQATILCSKKVGLQIRTRSGGHDAEGMSYISQVPFV
VVDLRNMHSIKIDVHSQTAWVEAGATLGEVYYWINEKNENLSFPGGYCPT
VGVGGHFSGGGYGALMRNYGLAADNIIDAHLVNVDGKVLDRKSMGEDLFW
AIRGGGGENFGIIAAWKIKLVAVPSKSTIFSVKKNMEIHGLVKLFNKWQN
IAYKYDKDLVLMTHFITKNITDNHGKNKTTVHGYFSSIFHGGVDSLVDLM
NKSFPELGIKKTDCKEFSWIDTTIFYSGVVNFNTANFKKEILLDRSAGKK
TAFSIKLDYVKKPIPETAMVKILEKLYEEDVGAGMYVLYPYGGIMDEISE
SAIPFPHRAGIMYELWYTASWEKQEDNEKHLNWIRSVYNFTTPYVSQNPR
LAYLNYRDLDLGKTNPESPNNYTQARIWGEKYFGKNFNRLVKVKTKADPN
NFFRNEQSIPPLPPHHH.

[0279] A non-limiting example of a nucleic acid sequence encoding SEQ ID NO: 43 for expression in S. cerevisiae is:

(SEQ ID NO: 34)
aatccaagagaaaatttccttaaatgctttagcaagcatatccctaacaa
tgtcgcaaaccctaagcttgtgtacacgcaacatgatcagctttacatgt
cgatccttaacagcactatacaaaatttgaggtttatttcagatacgacc
ccgaaacctttagtcattgtgactccatccaacaatagccatatacaagc
aacaatattgtgtagtaagaaagtgggattgcaaatcaggaccagaagtg
gcggtcacgatgctgaaggaatgtcctacattagtcaagtccctttcgtt
gttgtagacttaaggaatatgcattcaattaaaatagacgttcattctca
gaccgcttgggtcgaagcaggagcaacacttggcgaggtatactactgga
taaatgagaaaaacgaaaatctttcattcccaggtggttactgccctact
gttggtgttggtggtcatttcagtggcggtggatatggagctttaatgag
gaattacggtcttgctgccgacaatattattgacgctcatttagtcaatg
tggacggaaaagtgttagataggaaaagcatgggtgaagatttattttgg
gccattagaggaggaggaggtgaaaattttggcattatagctgcatggaa
gattaaactagttgcagtcccctcaaaaagcactatcttttccgtaaaga
aaaatatggaaattcatggtctggttaagttgtttaataagtggcaaaac
atcgcttataagtatgataaagatcttgtgctaatgactcactttatcac
taaaaatataactgataatcatggtaaaaataaaacaacagttcatggtt
atttttctagtatctttcatggtggcgtggatagcttagttgaccttatg
aacaagtcgttcccagaactaggcattaagaagactgactgtaaagaatt
ttcatggatcgacacaacaatcttttattccggtgttgttaacttcaaca
ctgcaaattttaagaaagagatactattggatagatctgcgggtaaaaag
acggctttctccattaaactggactacgtaaagaaaccaatccctgagac
cgcaatggttaaaattttggaaaagttgtacgaagaagatgttggcgctg
gtatgtacgtcttatatccatatggtggaattatggacgaaatttctgag
tctgctattcccttccctcatagagccggcatcatgtatgagttatggta
cactgctagctgggagaaacaggaagataatgagaaacatttgaactgga
taaggagcgtctacaactttaccactccttacgtatcgcaaaatcctaga
ctagcctacttaaattatagagatctggatttggggaagactaaccctga
atctcccaataattacacacaagctagaatatggggcgagaaatacttcg
gaaaaaattttaacaggttagtaaaggttaaaaccaaggcggatcctaac
aatttcttccgtaatgaacaaagcattccacccttgccaccccaccatca
t.

[0280] In some embodiments, a THCAS comprises each of: SEQ ID NO: 43: the MFalpha2 signal peptide; and the HDEL signal peptide. In some embodiments, such a THCAS comprises the amino acid sequence shown below, in which signal peptides are underlined and bolded:

(SEQ ID NO: 234)
MKFISTFLTFILAAVSVTANPRENFLKCFSKHIPNNVANP
KLVYTQHDQLYMSILNSTIQNLRFISDTTPKPLVIVTPSN
NSHIQATILCSKKVGLQIRTRSGGHDAEGMSYISQVPFVV
VDLRNMHSIKIDVHSQTAWVEAGATLGEVYYWINEKNENL
SFPGGYCPTVGVGGHFSGGGYGALMRNYGLAADNIIDAHL
VNVDGKVLDRKSMGEDLFWAIRGGGGENFGIIAAWKIKLV
AVPSKSTIFSVKKNMEIHGLVKLFNKWQNIAYKYDKDLVL
MTHFITKNITDNHGKNKTTVHGYFSSIFHGGVDSLVDLMN
KSFPELGIKKTDCKEFSWIDTTIFYSGVVNFNTANFKKEI
LLDRSAGKKTAFSIKLDYVKKPIPETAMVKILEKLYEEDV
GAGMYVLYPYGGIMDEISESAIPFPHRAGIMYELWYTASW
EKQEDNEKHLNWIRSVYNFTTPYVSQNPRLAYLNYRDLDL
GKTNPESPNNYTQARIWGEKYFGKNFNRLVKVKTKADPNN
FFRNEQSIPPLPPHHHHDEL

[0281] A non-limiting example of a nucleic acid sequence encoding SEQ ID NO: 234 is shown below, in which sequences encoding signal peptides are underlined and bolded:

(SEQ ID NO: 227)
atgaagtttatcagtaccttcttgacctttatcttggccg
ctgtctccgtaaccgctaatccaagagaaaatttccttaa
atgctttagcaagcatatccctaacaatgtcgcaaaccct
aagcttgtgtacacgcaacatgatcagctttacatgtcga
tccttaacagcactatacaaaatttgaggtttatttcaga
tacgaccccgaaacctttagtcattgtgactccatccaac
aatagccatatacaagcaacaatattgtgtagtaagaaag
tgggattgcaaatcaggaccagaagtggcggtcacgatgc
tgaaggaatgtcctacattagtcaagtccctttcgttgtt
gtagacttaaggaatatgcattcaattaaaatagacgttc
attctcagaccgcttgggtcgaagcaggagcaacacttgg
cgaggtatactactggataaatgagaaaaacgaaaatctt
tcattcccaggtggttactgccctactgttggtgttggtg
gtcatttcagtggcggtggatatggagctttaatgaggaa
ttacggtcttgctgccgacaatattattgacgctcattta
gtcaatgtggacggaaaagtgttagataggaaaagctggg
tgaagatttattttgggccattagaggaggaggaggtgaa
aattttggcattatagctgcatggaagattaaactagttg
cagtcccctcaaaaagcactatcttttccgtaaagaaaaa
tatggaaattcatggtctggttaagttgtttaataagtgg
caaaacatcgcttataagtatgataaagatcttgtgctaa
tgactcactttatcactaaaaatataactgataatcatgg
taaaaataaaacaacagttcatggttatttttctagtatc
tttcatggtggcgtggatagcttagttgaccttatgaaca
agtcgttcccagaactaggcattaagaagactgactgtaa
agaattttcatggatcgacacaacaatcttttattccggt
gttgttaacttcaacactgcaaattttaagaaagagatac
tattggatagatctgcgggtaaaaagacggctttctccat
taaactggactacgtaaagaaaccaatccctgagaccgca
atggttaaaattttggaaaagttgtacgaagaagatgttg
gcgctggtatgtacgtcttatatccatatggtggaattat
ggacgaaatttctgagtctgctattcccttccctcataga
gccggcatcatgtatgagttatggtacactgctagctggg
agaaacaggaagataatgagaaacatttgaactggataag
gagcgtctacaactttaccactccttacgtatcgcaaaat
cctagactagcctacttaaattatagagatctggatttgg
ggaagactaaccctgaatctcccaataattacacacaagc
tagaatatggggcgagaaatacttcggaaaaaattttaac
aggttagtaaaggttaaaaccaaggcggatcctaacaatt
tcttccgtaatgaacaaagcattccacccttgccacccca
ccatcatcatgatgaatta.

[0282] In some embodiments, a THCAS comprises the amino acid sequence shown

(SEQ ID NO: 40)
NPRENFLKCFSKHIPNNVANPKLVYTQHDQLYMSILNSTI
QNLRFISDTTPKPLVIVTPSNNSHIQATILCSKKVGLQIR
TRSGGHDAEGMSYISQVPFVVVDLRNMHSIKIDVHSQTAW
VEAGATLGEVYYWINEKNENLSFPGGYCPTVGVGGHFSGG
GYGALMRNYGLAADNIIDAHLVNVDGKVLDRKSMGEDLFW
AIRGGGGENFGIIAAWKIKLVAVPSKSTIFSVKKNMEIHG
LVKLFNKWQNIAYKYDKDLVLMTHFITKNITDNHGKNKTT
VHGYFSSIFHGGVDSLVDLMNKSFPELGIKKTDCKEFSWI
DTTIFYSGVVNFNTANFKKEILLDRSAGKKTAFSIKLDYV
KKPIPETAMVKILEKLYEEDVGAGMYVLYPYGGIMDEISE
SAIPFPHRAGIMYELWYTASWEKQEDNEKHLNWIRNIYNF
MTPYVSKNPRLAYLNYRDLDIGINDPKNPNNYTQARIWGE
KYFGKNFDRLVKVKTLVDPNNFFRNEQSIPPLPRHRH.

[0283] A non-limiting example of a nucleic acid sequence encoding SEQ ID NO: 40 for expression in S. cerevisiae is:

(SEQ ID NO: 31)
aatcctagagaaaatttcttgaaatgcttttccaaacaca
tccctaacaatgtcgccaatcccaaattagtttatactca
acatgatcaactatatatgtcaatattaaattctactatt
caaaatttgagatttattagtgatactactccaaaacctc
tggtgattgtcactccaagcaacaattcccacatccaggc
aacaatcttgtgtagcaagaaagtgggacttcaaattagg
accagatctggtggccatgatgcggaaggtatgtcatata
ttagtcaagttccgtttgtagtagttgatttgcgtaatat
gcatagtatcaagatcgacgttcattcccaaacagcctgg
gtggaggcgggtgccactctgggggaagtttactactgga
taaatgagaagaacgagaatttatcatttccgggtggtta
ctgccctacagtaggggtaggtggtcatttttcaggcggt
ggctacggggcattaatgaggaattatggattggctgctg
ataacataatagacgcccatttagtcaacgtagatgggaa
agtgttggataggaagtctatgggtgaagacctattttgg
gcaatcagaggaggcggcggagagaacttcggtattattg
ccgcatggaaaataaagctagtcgccgtaccgtccaaatc
tactattttttccgtcaagaaaaatatggaaatccatggg
ctggttaaattgtttaataaatggcagaatatagcttata
agtacgataaggatctggttcttatgactcattttattac
caaaaatataacagacaatcatgggaaaaacaaaactact
gtacacggatatttctcaagtattttccatggcggggtag
atagcttagtagacttgatgaataaatcgttcccagaatt
aggaattaagaagactgactgtaaggaattcagttggata
gatacgaccattttctattcaggtgttgttaattttaaca
ccgccaactttaaaaaggaaattttactggacagatccgc
cggtaaaaagacagctttttcaatcaagttggattatgta
aaaaaacctataccagaaactgcaatggttaaaattcttg
aaaagttatacgaagaggatgtcggagccggaatgtacgt
attatacccttatgggggtatcatggatgaaatatctgaa
tcggctattccattccctcacagggcaggtattatgtatg
aattgtggtataccgctagctgggagaagcaagaggataa
cgaaaagcacctgaattggataaggaacatttataatttt
atgactccatatgtctcaaaaaacccacgtttagcttact
taaattatgtgatttggatataggtatcaacgacccaaag
aatccaaataactacacccaagctagaatttggggtgaga
aatactttggaaagaattttgataggctagtaaaagtgaa
gacacttgttgacccaaacaatttttttagaaacgaacaa
agcattccacctttgcctcgtcatagacac.

[0284] In some embodiments, a THCAS comprises each of: SEQ ID NO: 40; the MFalpha2 signal peptide; and the HDEL signal peptide. In some embodiments, such a THCAS comprises the amino acid sequence shown below, in which signal peptides are underlined and bolded:

(SEQ ID NO: 235)
MKFISTFLTFILAAVSVTANPRENFLKCFSKHIPNNVANP
KLVYTQHDQLYMSILNSTIQNLRFISDTTPKPLVIVTPSN
NSHIQATILCSKKVGLQIRTRSGGHDAEGMSYISQVPFVV
VDLRNMHSIKIDVHSQTAWVEAGATLGEVYYWINEKNENL
SFPGGYCPTVGVGGHFSGGGYGALMRNYGLAADNIIDAHL
VNVDGKVLDRKSMGEDLFWAIRGGGGENFGIIAAWKIKLV
AVPSKSTIFSVKKNMEIHGLVKLENKWQNIAYKYDKDLVL
MTHFITKNITDNHGKNKTTVHGYFSSIFHGGVDSLVDLMN
KSFPELGIKKTDCKEFSWIDTTIFYSGVVNFNTANFKKEI
LLDRSAGKKTAFSIKLDYVKKPIPETAMVKILEKLYEEDV
GAGMYVLYPYGGIMDEISESAIPFPHRAGIMYELWYTASW
EKQEDNEKHLNWIRNIYNFMTPYVSKNPRLAYLNYRDLDI
GINDPKNPNNYTQARIWGEKYFGKNFDRLVKVKTLVDPNN
FFRNEQSIPPLPRHRHHDEL

[0285] A non-limiting example of a nucleic acid sequence encoding SEQ ID NO: 235 is shown below, in which sequences encoding signal peptides are underlined and bolded:

(SEQ ID NO: 228)
atgaagtttatcagtaccttcttgacctttatcttggccg
ctgtctccgtaaccgctaatcctagagaaaatttcttgaa
atgcttttccaaacacatccctaacaatgtcgccaatccc
aaattagtttatactcaacatgatcaactatatatgtcaa
tattaaattctactattcaaaatttgagatttattagtga
tactactccaaaacctctggtgattgtcactccaagcaac
aattcccacatccaggcaacaatcttgtgtagcaagaaag
tgggacttcaaattaggaccagatctggtggccatgatgc
ggaaggtatgtcatatattagtcaagttccgtttgtagta
gttgatttgcgtaatatgcatagtatcaagatcgacgttc
attcccaaacagcctgggggaggcgggtgccactctgggg
gaagtttactactggataaatgagaagaacgagaatttat
catttccgggtggttactgccctacagtaggggtaggtgg
tcatttttcaggcggtggctacggggcattaatgaggaat
tatggattggctgctgataacataatagacgcccatttag
tcaacgtagatgggaaagtgttggataggaagtctatggg
tgaagacctattttgggcaatcagaggaggcggcggagag
aacttcggtattattgccgcatggaaaataaagctagtcg
ccgtaccgtccaaatctactattttttccgtcaagaaaaa
tatggaaatccatgggctggttaaattgtttaataaatgg
cagaatatagcttataagtacgataaggatctggttctta
tgactcattttattaccaaaaatataacagacaatcatgg
gaaaaacaaaactactgtacacggatatttctcaagtatt
ttccatggggggtagatagcttagtagacttgatgaataa
atcgttcccagaattaggaattaagaagactgactgtaag
gaattcagttggatagatacgaccattttctattcaggtg
ttgttaattttaacaccgccaactttaaaaaggaaatttt
actggacagatccgccggtaaaaagacagctttttcaatc
aagttggattatgtaaaaaaacctataccagaaactgcaa
tggttaaaattcttgaaaagttatacgaagaggatgtcgg
agccggaatgtacgtattatacccttatgggggtatcatg
gatgaaatatctgaatcggctattccattccctcacaggg
caggtattatgtatgaattgtggtataccgctagctggga
gaagcaagaggataacgaaaagcacctgaattggataagg
aacatttataattttatgactccatatgtctcaaaaaacc
cacgtttagcttacttaaattatcgtgatttggatatagg
tatcaacgacccaaagaatccaaataactacacccaagct
agaatttggggtgagaaatactttggaaagaattttgata
ggctagtaaaagtgaagacacttgttgacccaaacaattt
ttttagaaacgaacaaagcattccacctttgcctcgtcat
agacaccatgatgaatta.

[0286] In some embodiments, a THCAS comprises the amino acid sequence shown below:

(SEQ ID NO: 39)
NPQENFLKCFSEYIPNNPANPKFIYTQHDQLYMSVLNSTI
QNLRFTSDTTPKPLVIVTPSNVSHIQASILCSKKVGLQIR
TRSGGHDSEGMSYISQVPFVVVDLRNMHSIKIDVHSQTAW
VEAGATLGEVYYWINEKNENLSFPGGYCPTVGVGGHFSGG
GYGALMRNYGLAADNIIDAHLVNVDGKVLDRKSMGEDLFW
AIRGGGGENFGIIAAWKIKLVAVPSKSTIFSVKKNMEIHG
LVKLFNKWQNIAYKYDKDLLLMTHFITRNITDNQGKNKTA
IHTYFSSVFLGGVDSLVDLMNKSFPELGIKKTDCKELSWI
DTTIFYSGVVNYNTTNFQKEILLDRSAGKKTAFSIKLDYV
KKPIPETAMVKILEKLYEEDVGVGMYVLYPYGGIMEEISE
SAIPFPHRAGIMYELWYTASWEKQEDNEKHINWVRSVYNF
TTPYVSQNPRLAYLNYRDLDLGKTNPESPNNYTQARIWGE
KYFGKNFNRLVKVKTKADPNNFFRNEQSIPPLPPHHH.

[0287] A non-limiting example of a nucleic acid sequence encoding SEQ ID NO: 39 for expression in S. cerevisiae is:

(SEQ ID NO: 30)
aatccccaagaaaatttcctgaaatgtttcagcgagtata
taccaaataaccctgcaaatcctaagtttatatatactca
acatgaccaactttacatgtctgttttaaattctaccatt
caaaatttgagatttacaagcgataccactccaaaacctt
tggttatagtgacaccgagtaacgttagtcatattcaggc
ttcaatcttgtgctcgaaaaaggtgggattacaaattagg
actcgtagcggaggtcatgattctgagggtatgagttaca
tttctcaagttcccttcgttgttgtggaccttaggaatat
gcattccataaaaatagatgtacactctcagacagcatgg
gttgaagctggtgccacactgggggaagtatattattgga
tcaacgaaaagaacgagaacctgtcgtttcctggtggcta
ttgcccaacagtcggtgtaggcggacactttagtggtggt
ggatacggtgccctaatgaggaactacggactagctgccg
ataatataatcgatgcacatctagtcaatgttgatggcaa
agtcttagacaggaagtctatgggtgaagacctattctgg
gctataagaggtggtggtggggaaaatttcggtatcatag
cggcatggaagataaaacttgtagctgtgcctagtaagtc
taccattttctctgtaaaaaaaaacatggagattcacggt
ttggtgaagctttttaataaatggcaaaacattgcctaca
aatacgataaagatttgctattgatgacacatttcataac
tagaaatattactgacaaccagggtaaaaacaagacggca
attcacacttacttttcttctgtttttttaggtggtgttg
attctttagttgatttgatgaataagagttttccggaact
gggcataaagaagaccgactgtaaggaattgtcttggatc
gacaccaccattttttactccggagttgttaattacaata
ctactaattttcaaaaagagatattattagatagatcagc
tggcaagaaaacagccttttctatcaaattggattatgta
aaaaaacccatacctgaaacagctatggtgaagattttag
aaaaattgtatgaagaagacgtgggcgtgggcatgtacgt
tctatacccctacggcggtattatggaagaaatttctgag
agcgcgatccctttcccgcatagggcaggaatcatgtatg
agttatggtacacggcatcgtgggaaaaacaagaagacaa
cgaaaagcatatcaactgggtgaggtctgtttacaatttt
acaactccctatgttagtcaaaatccaagattggcatact
taaattacagagatcttgacttgggaaaaacaaatccaga
atcgcccaacaattacacgcaagccagaatctggggggaa
aaatactttgggaaaaattttaacaggttagtcaaagtga
agactaaagccgatccaaataacttttttagaaatgagca
gtctatccctccattaccgccacatcatcat.

[0288] In some embodiments, a THCAS comprises each of: SEQ ID NO: 39; the MFalpha2 signal peptide; and the HDEL signal peptide. In some embodiments, such a THCAS comprises the amino acid sequence shown below, in which signal peptides are underlined and bolded:

(SEQ ID NO: 236)
MKFISTFLTFILAAVSVTANPQENFLKCFSEYIPNNPANP
KFIYTQHDQLYMSVLNSTIQNLRFTSDTTPKPLVIVTPSN
VSHIQASILCSKKVGLQIRTRSGGHDSEGMSYISQVPFVV
VDLRNMHSIKIDVHSQTAWVEAGATLGEVYYWINEKNENL
SFPGGYCPTVGVGGHFSGGGYGALMRNYGLAADNIIDAHL
VNVDGKVLDRKSMGEDLFWAIRGGGGENFGIIAAWKIKLV
AVPSKSTIFSVKKNMEIHGLVKLFNKWQNIAYKYDKDLLL
MTHFITRNITDNQGKNKTAIHTYFSSVFLGGVDSLVDLMN
KSFPELGIKKTDCKELSWIDTTIFYSGVVNYNTTNFQKEI
LLDRSAGKKTAFSIKLDYVKKPIPETAMVKILEKLYEEDV
GVGMYVLYPYGGIMEEISESAIPFPHRAGIMYELWYTASW
EKQEDNEKHINWVRSVYNFTTPYVSQNPRLAYLNYRDLDL
GKTNPESPNNYTQARIWGEKYFGKNFNRLVKVKTKADPNN
FFRNEQSIPPLPPHHHHDEL

[0289] A non-limiting example of a nucleic acid sequence encoding SEQ ID NO: 236 is shown below, in which sequences encoding signal peptides are underlined and bolded:

(SEQ ID NO: 229)
atgaagtttatcagtaccttcttgacctttatcttggccg
ctgtctccgtaaccgctaatccccaagaaaatttcctgaa
atgtttcagcgagtatataccaaataaccctgcaaatcct
aagtttatatatactcaacatgaccaactttacatgtctg
ttttaaattctaccattcaaaatttgagatttacaagcga
taccactccaaaacctttggttatagtgacaccgagtaac
gttagtcatattcaggcttcaatcttgtgctcgaaaaagg
tgggattacaaattaggactcgtagcggaggtcatgattc
tgagggtatgagttacatttctcaagttcccttcgttgtt
gtggaccttaggaatatgcattccataaaaatagatgtac
actctcagacagcatgggttgaagctggtgccacactggg
ggaagtatattattggatcaacgaaaagaacgagaacctg
tcgtttcctggtggctattgcccaacagtcggtgtaggcg
gacactttagtggtggtggatacggtgccctaatgaggaa
ctacggactagctgccgataatataatcgatgcacatcta
gtcaatgttgatggcaaagtcttagacaggaagtctatgg
gtgaagacctattctgggctataagaggtggtggtgggga
aaatttcggtatcatagcggcatggaagataaaacttgta
gctgtgcctagtaagtctaccattttctctgtaaaaaaaa
acatggagattcacggtttggtgaagctttttaataaatg
gcaaaacattgcctacaaatacgataaagatttgctattg
atgacacatttcataactagaaatattactgacaaccagg
gtaaaaacaagacggcaattcacacttacttttcttctgt
ttttttaggtggtgttgattctttagttgatttgatgaat
aagagttttccggaactgggcataaagaagaccgactgta
aggaattgtcttggatcgacaccaccattttttactccgg
agttgttaattacaatactactaattttcaaaaagagata
ttattagatagatcagctggcaagaaaacagccttttcta
tcaaattggattatgtaaaaaaacccatacctgaaacagc
tatggtgaagattttagaaaaattgtatgaagaagacgtg
ggcgtgggcatgtacgttctatacccctacggcggtatta
tggaagaaatttctgagagcgcgatccctttcccgcatag
ggcaggaatcatgtatgagttatggtacacggcatcgtgg
gaaaaacaagaagacaacgaaaagcatatcaactgggtga
ggtctgtttacaattttacaactccctatgttagtcaaaa
tccaagattggcatacttaaattacagagatcttgacttg
ggaaaaacaaatccagaatcgcccaacaattacacgcaag
ccagaatctggggggaaaaatactttgggaaaaattttaa
caggttagtcaaagtgaagactaaagccgatccaaataac
ttttttagaaatgagcagtctatccctccattaccgccac
atcatcatcatgatgaatta.

[0290] In some embodiments, a THCAS comprises the amino acid sequence shown below:

(SEQ ID NO: 38)
NPRENFLKCFSKHIPNNVANPKLVYTQHDQLYMSILNSTI
QNLRFISDTTPKPLVIVTPSNNSHIQATILCSKKVGLQIR
TRSGGHDAEGMSYISQVPFVVVDLRNMHSIKIDVHSQTAW
VEAGATLGEVYYWINEKNENLSFPGGYCPTVGVGGHFSGG
GYGALMRNYGLAADNIIDAHLVNVDGKVLDRKSMGEDLFW
AIRGGGGENFGIIAAWKIKLVAVPSKSTIFSVKKNMEIHG
LVKLFNKWQNIAYKYDKDLVLMTHFITKNITDNHGKNKTT
VHGYFSSIFHGGVDSLVDLMNKSFPELGIKKTDCKEFSWI
DTTIFYSGVVNFNTANFKKEILLDRSAGKKTAFSIKLDYV
KKPIPETAMVKILEKLYEEDVGAGMYVLYPYGGIMEEISE
SAIPFPHRAGIMYELWYTASWEKQEDNEKHINWVRSVYNF
TTPYVSQNPRLAYLNYRDLDLGKTNHASRNNYTQARIWGE
KYFGKNFNRLVKVKTKVDPNNFFRNEQSIPPLPPHHH

[0291] A non-limiting example of a nucleic acid sequence encoding SEQ ID NO: 38 for expression in S. cerevisiae is:

(SEQ ID NO: 29)
aatcccagagaaaattttttgaagtgtttttcaaagcaca
tacctaacaacgtcgccaatccgaagcttgtttatacaca
acacgatcaactatacatgtctattttgaatagtactatt
cagaatcttagatttatctcagacacaacacctaagccat
tggttattgtgacaccgtctaataattctcacattcaagc
aacaatattgtgctcgaaaaaggttggcttgcagatcaga
actagaagtggtggacatgatgcagaagggatgtcatata
tatctcaagtacccttcgtagttgttgatttaagaaatat
gcactctatcaaaatagatgtgcacagtcaaactgcttgg
gtcgaagctggcgcaactctaggggaggtgtactattgga
ttaatgaaaaaaacgaaaatctatcctttcctggcggtta
ctgcccgactgtaggtgtcggagggcacttcagtggtggt
ggatatggagctttgatgaggaactatggcttggctgcag
ataacattatagacgctcacctagtaaacgtagatgggaa
agtcttagatagaaaatcaatgggtgaggatttgttttgg
gctattcgtggggagggggcgaaaactttggtatcattgc
cgcatggaagataaaacttgtggctgttcccagcaaatca
actattttctctgttaagaagaatatggaaattcatgggt
tagttaaacttttcaataagtggcaaaatattgcctataa
atatgacaaagatttggtattgatgacacatttcatcact
aagaatatcactgacaatcatggaaagaacaaaacaacag
tacacggttacttctcctcaattttccatggtggtgtcga
ttcccttgtcgatctgatgaacaagtctttccctgaacta
ggtataaagaaaaccgactgtaaagagttttcatggatag
acacaacgatattttattcaggagtggtgaactttaacac
tgcaaatttcaaaaaggagattttattggacagatctgca
ggtaagaagactgcctttagcattaaattggactatgtaa
aaaagccgatcccagagaccgctatggttaaaatcttaga
aaagttatacgaggaagacgtcggtgcaggaatgtatgtc
ttgtatccttatggcggtatcatggaagaaatatcagagt
ctgctatcccatttccacatagagcagggataatgtacga
gttgtggtatactgcatcatgggaaaagcaagaggataac
gaaaaacacataaactgggtaagatccgtttataatttta
ctactccatacgtatctcaaaatcctagattagcttattt
aaactacagagatttagatttagggaaaaccaaccatgct
agtaggaacaactacacccaagccagaatatggggtgaaa
aatactttggaaaaaattttaataggttagtaaaagtgaa
aacaaaagtcgatcccaacaattttttcagaaacgagcaa
tccatacctcccttacctccgcaccatcac.

[0292] In some embodiments, a THCAS comprises each of: SEQ ID NO: 38; the MFalpha2 signal peptide; and the HDEL signal peptide. In some embodiments, such a THCAS comprises the amino acid sequence shown below, in which signal peptides are underlined and bolded:

(SEQ ID NO: 237)
MKFISTFLTFILAAVSVTANPRENFLKCFSKHIPNNVANP
KLVYTQHDQLYMSILNSTIQNLRFISDTTPKPLVIVTPSN
NSHIQATILCSKKVGLQIRTRSGGHDAEGMSYISQVPFVV
VDLRNMHSIKIDVHSQTAWVEAGATLGEVYYWINEKNENL
SFPGGYCPTVGVGGHFSGGGYGALMRNYGLAADNIIDAHL
VNVDGKVLDRKSMGEDLFWAIRGGGGENFGIIAAWKIKLV
AVPSKSTIFSVKKNMEIHGLVKLFNKWQNIAYKYDKDLVL
MTHFITKNITDNHGKNKTTVHGYFSSIFHGGVDSLVDLMN
KSFPELGIKKTDCKEFSWIDTTIFYSGVVNFNTANFKKEI
LLDRSAGKKTAFSIKLDYVKKPIPETAMVKILEKLYEEDV
GAGMYVLYPYGGIMEEISESAIPFPHRAGIMYELWYTASW
EKQEDNEKHINWVRSVYNFTTPYVSQNPRLAYLNYRDLDL
GKTNHASRNNYTQARIWGEKYFGKNFNRLVKVKTKVDPNN
FFRNEQSIPPLPPHHHHDEL

[0293] A non-limiting example of a nucleic acid sequence encoding SEQ ID NO: 237 is shown below, in which sequences encoding signal peptides are underlined and bolded:

(SEQ ID NO: 230)
atgaagtttatcagtaccttcttgacctttatcttggccg
ctgtctccgtaaccgctaatcccagagaaaattttttgaa
gtgtttttcaaagcacatacctaacaacgtcgccaatccg
aagcttgtttatacacaacacgatcaactatacatgtcta
ttttgaatagtactattcagaatcttagatttatctcaga
cacaacacctaagccattggttattgtgacaccgtctaat
aattctcacattcaagcaacaatattgtgctcgaaaaagg
ttggcttgcagatcagaactagaagtggtggacatgatgc
agaagggatgtcatatatatctcaagtacccttcgtagtt
gttgatttaagaaatatgcactctatcaaaatagatgtgc
acagtcaaactgcttgggtcgaagctggcgcaactctagg
ggaggtgtactattggattaatgaaaaaaacgaaaatcta
tcctttcctggcggttactgcccgactgtaggtgtcggag
ggcacttcagtggtggtggatatggagctttgatgaggaa
ctatggcttggctgcagataacattatagacgctcaccta
gtaaacgtagatgggaaagtcttagatagaaaatcaatgg
gtgaggatttgttttgggctattcgtggcggagggggcga
aaactttggtatcattgccgcatggaagataaaacttgtg
gctgttcccagcaaatcaactattttctctgttaagaaga
atatggaaattcatgggttagttaaacttttcaataagtg
gcaaaatattgcctataaatatgacaaagatttggtattg
atgacacatttcatcactaagaatatcactgacaatcatg
gaaagaacaaaacaacagtacacggttacttctcctcaat
tttccatggtggtgtcgattcccttgtcgatctgatgaac
aagtctttccctgaactaggtataaagaaaaccgactgta
aagagttttcatggatagacacaacgatattttattcagg
agtggtgaactttaacactgcaaatttcaaaaaggagatt
ttattggacagatctgcaggtaagaagactgcctttagca
ttaaattggactatgtaaaaaagccgatcccagagaccgc
tatggttaaaatcttagaaaagttatacgaggaagacgtc
ggtgcaggaatgtatgtcttgtatccttatggcggtatca
tggaagaaatatcagagtctgctatcccatttccacatag
agcagggataatgtacgagttgtggtatactgcatcatgg
gaaaagcaagaggataacgaaaaacacataaactgggtaa
gatccgtttataattttactactccatacgtatctcaaaa
tcctagattagcttatttaaactacagagatttagattta
gggaaaaccaaccatgctagtaggaacaactacacccaag
ccagaatatggggtgaaaaatactttggaaaaaattttaa
taggttagtaaaagtgaaaacaaaagtcgatcccaacaat
tttttcagaaacgagcaatccatacctcccttacctccgc
accatcaccatgatgaatta.

[0294] In some embodiments, a THCAS comprises the amino acid sequence shown below:

(SEQ ID NO: 42)
NPRENFLKCFSKHIPNNVANPKLVYTQHDQLYMSILNSTI
QNLRFISDTTPKPLVIVTPSNNSHIQATILCSKKVGLQIR
TRSGGHDAEGMSYISQVPFVVVDLRNMHSIKIDVHSQTAW
VEAGATLGEVYYWINEKNENLSFPGGYCPTVGVGGHFSGG
GYGALMRNYGLAADNIIDAHLVNVDGKVLDRKSMGEDLFW
AIRGGGGENFGIIAAWKIKLVAVPSKSTIFSVKKNMEIHG
LVKLFNKWQNIAYKYDKDLLLMTHFITRNITDNQGKNKTA
IHTYFSSVFLGGVDSLVDLMNKSFPELGIKKTDCKELSWI
DTTIFYSGVVNFNTANFKKEILLDRSAGKKTAFSIKLDYV
KKPIPETAMVKILEKLYEEDVGAGMYVLYPYGGIMDEISE
SAIPFPHRAGIMYELWYTASWEKQEDNEKHINWVRSVYNF
TTPYVSQNPRLAYLNYRDLDLGKTNPESPNNYTQARIWGE
KYFGKNFNRLVKVKTKADPNNFFRNEQSIPPLPPHHH.

[0295] A non-limiting example of a nucleic acid sequence encoding SEQ ID NO: 42 for expression in S. cerevisiae is:

(SEQ ID NO: 33)
aatcccagggagaattttttaaaatgcttttcgaagcata
tcccaaacaatgtagctaatccaaagctggtttacacaca
acacgatcaactatatatgtctatattgaacagtaccatc
caaaacttaaggttcatatccgacacaactcctaaaccac
tagtaattgtgacgcctagcaacaattctcatatacaggc
aaccatattatgttcaaagaaagttggattgcaaatccgt
accagatcaggtggtcacgatgcagagggcatgagctata
tttctcaagtgccctttgtagtcgtggatcttagaaacat
gcatagtatcaagatcgatgtgcactcacaaacagcttgg
gttgaggcaggtgccactctgggggaagtatattattgga
taaatgaaaaaaatgaaaatttaagtttcccagggggtta
ctgtccgaccgttggagtaggtggacacttttccgggggg
ggttatggcgctttgatgagaaactatggtttggctgctg
acaacattatcgacgctcatcttgttaacgtagatggtaa
agtacttgatagaaaaagcatgggcgaagaccttttctgg
gccataagaggtggcggtggggagaattttgggattattg
ctgcctggaagattaaattggttgccgtcccatcaaagtc
cacaattttctcggttaagaaaaacatggagatccacggt
ttagttaagttatttaacaagtggcagaacattgcctaca
agtatgataaggatttgctacttatgacccactttattac
tagaaatatcactgacaatcaaggcaagaacaaaacagca
atacatacctactttagttcagtttttttaggtggagtag
atagtctagttgatttaatgaataaatcctttccagaatt
ggggattaaaaagaccgattgtaaagagttgtcctggatt
gatactacaattttttacagcggtgtagttaattttaata
cagccaatttcaaaaaggaaattttattggacagatccgc
agggaaaaaaacggccttttctattaaattagattatgtt
aaaaagcccattcccgaaacagctatggttaaaattttgg
aaaaactttacgaggaggacgtgggtgctggtatgtatgt
attatatccgtatggcggtattatggatgaaatttccgag
tcagcaattcccttcccacacagggctggaatcatgtatg
aattatggtatactgcttcttgggagaagcaggaagataa
cgagaaacacattaattgggtaaggtcggtttacaatttt
accactccctacgtatcgcaaaacccccgtttggcctatt
taaattatagagacttagacttaggaaaaacaaacccaga
atcgcctaacaattacacccaagcaaggatatggggagaa
aaatattttggtaagaatttcaatcgtttagttaaggtga
agactaaagccgatccaaataactttttcaggaatgaaca
atccatcccaccacttcctcctcatcatcat.

[0296] In some embodiments, a THCAS comprises each of: SEQ ID NO: 42; the MFalpha2 signal peptide; and the HDEL signal peptide. In some embodiments, such a THCAS comprises the amino acid sequence shown below, in which signal peptides are underlined and bolded:

(SEQ ID NO: 239)
MKFISTFLTFILAAVSVTANPRENFLKCFSKHIPNNVANP
KLVYTQHDQLYMSILNSTIQNLRFISDTTPKPLVIVTPSN
NSHIQATILCSKKVGLQIRTRSGGHDAEGMSYISQVPFVV
VDLRNMHSIKIDVHSQTAWVEAGATLGEVYYWINEKNENL
SFPGGYCPTVGVGGHFSGGGYGALMRNYGLAADNIIDAHL
VNVDGKVLDRKSMGEDLFWAIRGGGGENFGIIAAWKIKLV
AVPSKSTIFSVKKNMEIHGLVKLENKWQNIAYKYDKDLLL
MTHFITRNITDNQGKNKTAIHTYFSSVFLGGVDSLVDLMN
KSFPELGIKKTDCKELSWIDTTIFYSGVVNFNTANFKKEI
LLDRSAGKKTAFSIKLDYVKKPIPETAMVKILEKLYEEDV
GAGMYVLYPYGGIMDEISESAIPFPHRAGIMYELWYTASW
EKQEDNEKHINWVRSVYNFTTPYVSQNPRLAYLNYRDLDL
GKTNPESPNNYTQARIWGEKYFGKNFNRLVKVKTKADPNN
FFRNEQSIPPLPPHHHHDEL

[0297] A non-limiting example of a nucleic acid sequence encoding SEQ ID NO: 239 is shown below, in which sequences encoding signal peptides are underlined and bolded:

(SEQ ID NO: 232)
atgaagtttatcagtaccttcttgacctttatcttggccg
ctgtctccgtaaccgctaatcccagggagaattttttaaa
atgcttttcgaagcatatcccaaacaatgtagctaatcca
aagctggtttacacacaacacgatcaactatatatgtcta
tattgaacagtaccatccaaaacttaaggttcatatccga
cacaactcctaaaccactagtaattgtgacgcctagcaac
aattctcatatacaggcaaccatattatgttcaaagaaag
ttggattgcaaatccgtaccagatcaggtggtcacgatgc
agagggcatgagctatatttctcaagtgccctttgtagtc
gtggatcttagaaacatgcatagtatcaagatcgatgtgc
actcacaaacagcttgggttgaggcaggtgccactctggg
ggaagtatattattggataaatgaaaaaaatgaaaattta
agtttcccagggggttactgtccgaccgttggagtaggtg
gacacttttccggggggggttatggcgctttgatgagaaa
ctatggtttggctgctgacaacattatcgacgctcatctt
gttaacgtagatggtaaagtacttgatagaaaaagcatgg
gcgaagaccttttctgggccataagaggtggcggtgggga
gaattttgggattattgctgcctggaagattaaattggtt
gccgtcccatcaaagtccacaattttctcggttaagaaaa
acatggagatccacggtttagttaagttatttaacaagtg
gcagaacattgcctacaagtatgataaggatttgctactt
atgacccactttattactagaaatatcactgacaatcaag
gcaagaacaaaacagcaatacatacctactttagttcagt
ttttttaggtggagtagatagtctagttgatttaatgaat
aaatcctttccagaattggggattaaaaagaccgattgta
aagagttgtcctggattgatactacaattttttacagcgg
tgtagttaattttaatacagccaatttcaaaaaggaaatt
ttattggacagatccgcagggaaaaaaacggccttttcta
ttaaattagattatgttaaaaagcccattcccgaaacagc
tatggttaaaattttggaaaaactttacgaggaggacgtg
ggtgctggtatgtatgtattatatccgtatggcggtatta
tggatgaaatttccgagtcagcaattcccttcccacacag
ggctggaatcatgtatgaattatggtatactgcttcttgg
gagaagcaggaagataacgagaaacacattaattgggtaa
ggtcggtttacaattttaccactccctacgtatcgcaaaa
cccccgtttggcctatttaaattatagagacttagactta
ggaaaaacaaacccagaatcgcctaacaattacacccaag
caaggatatggggagaaaaatattttggtaagaatttcaa
tcgtttagttaaggtgaagactaaagccgatccaaataac
tttttcaggaatgaacaatccatcccaccacttcctcctc
atcatcatcatgatgaatta.

[0298] In some embodiments, a THCAS comprises the amino acid sequence shown

(SEQ ID NO: 141)
NPRENFLKCFSKHIPNNVANPKLVYTQHDQLYMSILNSTI
QNLRFISDTTPKPLVIVTPSNNSHIQATILCSKKVGLQIR
TRSGGHDAEGMSYISQVPFVVVDLRNMHSIKIDVHSQTAW
VEAGATLGEVYYWINEKNENLSFPGGYCPTVGVGGHFSGG
GYGALMRNYGLAADNIIDAHLVNVDGKVLDRKSMGEDLFW
AIRGGGGENFGIIAAWKIKLVAVPSKSTIFSVKKNMEIHG
LVKLFNKWQNIAYKYDKDLVLMTHFITKNITDNHGKNKTT
VHGYFSSIFHGGVDSLVDLMNKSFPELGIKKTDCKEFSWI
DTTIFYSGVVNFNTANFKKEILLDRSAGKKTAFSIKLDYV
KKPIPETAMVKILEKLYEEDVGAGMYVLYPYGGIMEEISE
SAIPFPHRAGIMYELWYTASWEKQEDNEKHINWVRSVYNF
TTPYVSQNPRLAYLNYRDLDLGKTNHASPNNYTQARIWGE
KYFGKNFNRLVKVKTKVDPNNFFRNEQSIPPLPPHHH

[0299] A non-limiting example of a nucleic acid sequence encoding SEQ ID NO: 141 for expression in S. cerevisiae is:

(SEQ ID NO: 50)
aatcccagggagaactttcttaagtgtttcagtaaacata
tcccaaataacgtggcgaatccgaaattagtatacacgca
acacgatcagctatatatgagcattctgaatagtaccatt
caaaacttgcgctttatatcggacacaactccaaagcctt
tagtcatagttactccttcaaataattcccatattcaggc
tacaatcctctgctctaaaaaagttgggttgcaaatacgt
actagatcaggaggccacgatgccgaaggtatgtcttata
tctcccaagtgccattcgttgtcgtcgacttgaggaacat
gcattctattaagattgatgtacactcccagaccgcatgg
gttgaagctggtgccacattaggtgaagtatactattgga
taaacgagaaaaatgaaaatttatcgtttcctggaggcta
ttgtccaactgttggtgtcggtggtcatttctcaggcggg
ggctacggagcattgatgcgaaactacggactagcagctg
ataacattatagacgcccatctcgtgaatgtggatggtaa
agttcttgatagaaagagcatgggtgaagatttgttttgg
gcgatcagaggcggtggaggggaaaactttggtattattg
cggcttggaaaataaagctggtcgcagttccctcgaaaag
cacaatcttttctgtaaagaaaaatatggaaatacatggg
ttggtcaagttattcaataaatggcaaaacattgcttata
agtatgataaagacctcgttctgatgactcattttattac
gaaaaatattaccgacaatcaggtaagaataaaactacag
tgcacggttacttttcttcaattttccatggtggcgttga
ctctctagtagatttaatgaacaaaagtttccctgagtta
gggatcaagaaaacggattgtaaagaattttcttggatcg
acacaaccatattctattcgggtgttgttaactttaatac
cgcaaactttaaaaaggaaattttgttagatcgctctgct
ggaaagaaaacagcatttagtatcaaacttgactatgtaa
agaaaccgatacccgagactgccatggttaagatacttga
gaagctatacgaagaggatgtgggagctggcatgtacgtt
ctctacccttacggcggtataatggaagaaatttcagaat
ccgcaatcccattcccacacagagcaggtattatgtatga
actgtggtatactgcctcatgggagaaacaagaagataac
gaaaaacacattaattgggtccgtagcgtctacaatttca
ctacaccatatgtatcccaaaacccgagattggcttactt
gaattatagagacttggatctaggaaaaaccaatcatgcc
agcccgaataattatacacaggcaaggatttggggcgaga
agtatttcggcaagaacttcaacagattagtaaaagttaa
gaccaaagttgaccccaataacttttttagaaatgaacaa
agtatccctccactcccaccacatcatcat.

[0300] In some embodiments, a THCAS comprises each of: SEQ ID NO: 141; the MFalpha2 signal peptide; and the HDEL signal peptide. In some embodiments, such a THCAS comprises the amino acid sequence shown below, in which signal peptides are underlined and bolded:

(SEQ ID NO: 247)
MKFISTFLTFILAAVSVTANPRENFLKCFSKHIPNNVANP
KLVYTQHDQLYMSILNSTIQNLRFISDTTPKPLVIVTPSN
NSHIQATILCSKKVGLQIRTRSGGHDAEGMSYISQVPFVV
VDLRNMHSIKIDVHSQTAWVEAGATLGEVYYWINEKNENL
SFPGGYCPTVGVGGHFSGGGYGALMRNYGLAADNIIDAHL
VNVDGKVLDRKSMGEDLFWAIRGGGGENFGIIAAWKIKLV
AVPSKSTIFSVKKNMEIHGLVKLFNKWQNIAYKYDKDLVL
MTHFITKNITDNHGKNKTTVHGYFSSIFHGGVDSLVDLMN
KSFPELGIKKTDCKEFSWIDTTIFYSGVVNFNTANFKKEI
LLDRSAGKKTAFSIKLDYVKKPIPETAMVKILEKLYEEDV
GAGMYVLYPYGGIMEEISESAIPFPHRAGIMYELWYTASW
EKQEDNEKHINWVRSVYNFTTPYVSQNPRLAYLNYRDLDL
GKTNHASPNNYTQARIWGEKYFGKNFNRLVKVKTKVDPNN
FFRNEQSIPPLPPHHHHDEL

[0301] A non-limiting example of a nucleic acid sequence encoding SEQ ID NO: 247 is shown below, in which sequences encoding signal peptides are underlined and bolded:

(SEQ ID NO: 240)
atgaagtttatcagtaccttcttgacctttatcttggccg
ctgtctccgtaaccgctaatcccagggagaactttcttaa
gtgtttcagtaaacatatcccaaataacgtggcgaatccg
aaattagtatacacgcaacacgatcagctatatatgagca
ttctgaatagtaccattcaaaacttgcgctttatatcgga
cacaactccaaagcctttagtcatagttactccttcaaat
aattcccatattcaggctacaatcctctgctctaaaaaag
ttgggttgcaaatacgtactagatcaggaggccacgatgc
cgaaggtatgtcttatatctcccaagtgccattcgttgtc
gtcgacttgaggaacatgcattctattaagattgatgtac
actcccagaccgcatgggttgaagctggtgccacattagg
tgaagtatactattggataaacgagaaaaatgaaaattta
tcgtttcctggaggctattgtccaactgttggtgtcggtg
gtcatttctcaggcgggggctacggagcattgatgcgaaa
ctacggactagcagctgataacattatagacgcccatctc
gtgaatgtggatggtaaagttcttgatagaaagagcatgg
gtgaagatttgttttgggcgatcagaggcggtggagggga
aaactttggtattattgcggcttggaaaataaagctggtc
gcagttccctcgaaaagcacaatcttttctgtaaagaaaa
atatggaaatacatgggttggtcaagttattcaataaatg
gcaaaacattgcttataagtatgataaagacctcgttctg
atgactcattttattacgaaaaatattaccgacaatcacg
gtaagaataaaactacagtgcacggttacttttcttcaat
tttccatggtggcgttgactctctagtagatttaatgaac
aaaagtttccctgagttagggatcaagaaaacggattgta
aagaattttcttggatcgacacaaccatattctattcggg
tgttgttaactttaataccgcaaactttaaaaaggaaatt
ttgttagatcgctctgctggaaagaaaacagcatttagta
tcaaacttgactatgtaaagaaaccgatacccgagactgc
catggttaagatacttgagaagctatacgaagaggatgtg
ggagctggcatgtacgttctctacccttacggcggtataa
tggaagaaatttcagaatccgcaatcccattcccacacag
agcaggtattatgtatgaactgtggtatactgcctcatgg
gagaaacaagaagataacgaaaaacacattaattgggtcc
gtagcgtctacaatttcactacaccatatgtatcccaaaa
cccgagattggcttacttgaattatagagacttggatcta
ggaaaaaccaatcatgccagcccgaataattatacacagg
caaggatttggggcgagaagtatttcggcaagaacttcaa
cagattagtaaaagttaagaccaaagttgaccccaataac
ttttttagaaatgaacaaagtatccctccactcccaccac
atcatcatcatgatgaatta.

[0302] In some embodiments, a THCAS comprises the amino acid sequence shown below:

(SEQ ID NO: 144)
NPRENFLKCFSKHIPNNVANPKLVYTQHDQLYMSILNSTI
QNLRFISDTTPKPLVIVTPSDNSHIQATILCSKKVGLQIR
TRSGGHDAEGMSYISQVPFVVVDLRNMHSIKIDVHSQTAW
VEAGATLGEVYYWINEKNENLSFPGGYCPTVGVGGHFSGG
GYGALMRNYGLAADNIIDAHLVNVDGKVLDRKSMGEDLFW
AIRGGGGENFGIIAAWKIKLVAVPSKSTIFSVKKNMEIHG
LVKLFNKWQNIAYKYDKDLVLMTHFITKNITDNHGKNKTT
VHGYFSSIFHGGVDSLVDLMNKSFPELGIKKTDCKEFSWI
DTTIFYSGVVNFNTANFKKEILLDRSAGKKTAFSIKLDYV
KKPIPETAMVKILEKLYEEDVGAGMYVLYPYGGIMEEISE
SAIPFPHRAGIMYELWYTASWEKQEDNEKHINWVRSVYNF
TTPYVSQNPRLAYLNYRDLDLGKTNHASPNNYTQARIWGE
KYFGKNFNRLVKVKTKVDPNNFFRNEQSIPPLPPHHH

[0303] A non-limiting example of a nucleic acid sequence encoding SEQ ID NO: 144 for expression in S. cerevisiae is:

(SEQ ID NO: 53)
aacccacgtgagaactttttgaaatgtttctctaagcata
tccctaacaatgtggctaacccaaagttagtttacacaca
gcacgatcaactatatatgagcattttgaactccactatc
caaaatctgaggttcattagtgacaccacgcccaaaccat
tggttattgtaaccccttctgataactctcatatccaagc
tactatattatgttccaagaaggtcggcttgcaaattaga
actagatcaggaggtcacgatgctgaaggtatgtcataca
tttcccaagttccattcgttgttgtagacctaagaaatat
gcactctatcaaaattgatgtccattctcaaacagcctgg
gtcgaagctggtgctaccttgggtgaagtttattactgga
ttaacgaaaagaatgaaaacttgtcgttcccaggtggtta
ctgtccaaccgtgggtgttggtggacactttagcggtggt
ggatacggcgccttgatgagaaactatggtttagctgctg
acaatatcatcgatgcacaccttgtcaacgttgatggtaa
ggtattggacagaaaatcaatgggtgaagacttgttctgg
gctataagaggtggcggtggtgagaactttggtatcatcg
ctgcatggaagattaagttagttgccgtcccatctaagtc
cactatcttcagtgttaaaaagaacatggaaattcatggt
ttggtcaagctatttaataaatggcagaacatcgcttaca
agtacgataaggacttagttttgatgacccattttataac
taaaaacattactgataaccacggtaaaaataagactaca
gttcacggttatttctcctctatcttccatggtggagttg
actctctggtcgacctaatgaacaagtccttcccagaatt
gggtattaagaagactgattgcaaagaattttcatggatc
gataccaccattttctactctggcgtggttaactttaata
cggctaactttaagaaggaaatattgttagaccgttcggc
cggtaagaaaaccgctttttctataaagttggattatgtt
aagaaacctattcctgaaacagccatggtcaagatcttag
aaaaattgtacgaagaggatgtaggagctggtatgtacgt
tctttacccatatggtggtattatggaagaaatatctgag
tctgccattccattcccacatagggcaggcattatgtacg
aattgtggtatactgctagctgggaaaagcaagaagacaa
tgaaaaacacataaattgggttagaagtgtatacaatttc
actaccccctacgtcagccaaaacccaagattggcctatc
taaactaccgtgacctggacctaggtaaaactaaccacgc
ttcaccaaacaactacacccaagctagaatctggggagag
aagtatttcggtaagaatttcaacagattggtcaaagtga
agaccaaggtcgatccaaataattttttcagaaacgagca
atctattcccccattaccaccacatcatcac.

[0304] In some embodiments, a THCAS comprises each of: SEQ ID NO: 144; the MFalpha2 signal peptide; and the HDEL signal peptide. In some embodiments, such a THCAS comprises the amino acid sequence shown below, in which signal peptides are underlined and bolded:

(SEQ ID NO: 248)
MKFISTFLTFILAAVSVTANPRENFLKCFSKHIPNNVANP
KLVYTQHDQLYMSILNSTIQNLRFISDTTPKPLVIVTPSD
NSHIQATILCSKKVGLQIRTRSGGHDAEGMSYISQVPFVV
VDLRNMHSIKIDVHSQTAWVEAGATLGEVYYWINEKNENL
SFPGGYCPTVGVGGHFSGGGYGALMRNYGLAADNIIDAHL
VNVDGKVLDRKSMGEDLFWAIRGGGGENFGIAAWKIKLVA
VPSKSTIFSVKKNMEIHGLVKLFNKWONIAYKYDKDLVLM
THFITKNITDNHGKNKTTVHGYFSSIFHGGVDSLVDLMNK
SFPELGIKKTDCKEFSWIDTTIFYSGVVNFNTANFKKEIL
LDRSAGKKTAFSIKLDYVKKPIPETAMVKILEKLYEEDVG
AGMYVLYPYGGIMEEISESAIPFPHRAGIMYELWYTASWE
KQEDNEKHINWVRSVYNFTTPYVSQNPRLAYLNYRDLDLG
KTNHASPNNYTQARIWGEKYFGKNFNRLVKVKTKVDPNNF
FRNEQSIPPLPPHHHHDEL

[0305] A non-limiting example of a nucleic acid sequence encoding SEQ ID NO: 248 is shown below, in which sequences encoding signal peptides are underlined and bolded:

(SEQ ID NO: 241)
atgaagtttatcagtaccttcttgacctttatcttggccg
ctgtctccgtaaccgctaacccacgtgagaactttttgaa
atgtttctctaagcatatccctaacaatgtggctaaccca
aagttagtttacacacagcacgatcaactatatatgagca
ttttgaactccactatccaaaatctgaggttcattagtga
caccacgcccaaaccattggttattgtaaccccttctgat
aactctcatatccaagctactatattatgttccaagaagg
tcggcttgcaaattagaactagatcaggaggtcacgatgc
tgaaggtatgtcatacatttcccaagttccattcgttgtt
gtagacctaagaaatatgcactctatcaaaattgatgtcc
attctcaaacagcctgggtcgaagctggtgctaccttggg
tgaagtttattactggattaacgaaaagaatgaaaacttg
tcgttcccaggtggttactgtccaaccgtgggtgttggtg
gacactttagcggtggtggatacggcgccttgatgagaaa
ctatggtttagctgctgacaatatcatcgatgcacacctt
gtcaacgttgatggtaaggtattggacagaaaatcaatgg
gtgaagacttgttctgggctataagaggtggcggtggtga
gaactttggtatcatcgctgcatggaagattaagttagtt
gccgtcccatctaagtccactatcttcagtgttaaaaaga
acatggaaattcatggtttggtcaagctatttaataaatg
gcagaacatcgcttacaagtacgataaggacttagttttg
atgacccattttataactaaaaacattactgataaccacg
gtaaaaataagactacagttcacggttatttctcctctat
cttccatggtggagttgactctctggtcgacctaatgaac
aagtccttcccagaattgggtattaagaagactgattgca
aagaattttcatggatcgataccaccattttctactctgg
cgtggttaactttaatacggctaactttaagaaggaaata
ttgttagaccgttcggccggtaagaaaaccgctttttcta
taaagttggattatgttaagaaacctattcctgaaacagc
catggtcaagatcttagaaaaattgtacgaagaggatgta
ggagctggtatgtacgttctttacccatatggtggtatta
tggaagaaatatctgagtctgccattccattcccacatag
ggcaggcattatgtacgaattgtggtatactgctagctgg
gaaaagcaagaagacaatgaaaaacacataaattgggtta
gaagtgtatacaatttcactaccccctacgtcagccaaaa
cccaagattggcctatctaaactaccgtgacctggaccta
ggtaaaactaaccacgcttcaccaaacaactacacccaag
ctagaatctggggagagaagtatttcggtaagaatttcaa
cagattggtcaaagtgaagaccaaggtcgatccaaataat
tttttcagaaacgagcaatctattcccccattaccaccac
atcatcaccatgatgaatta

[0306] In some embodiments, a THCAS comprises the amino acid sequence shown below:

(SEQ ID NO: 155)
NPQENFLKCFSQYIPTNVTNAKLVYTQHDQFYMSILNSTI
QNLRFTSDTTPKPLVIITPLNVSHIQGTILCSKKVGLQIR
TRSGGHDAEGMSYISQVPFVVVDLRNMHSIKIDVHSQTAW
VEAGATLGEVYYWINEKNENLSFPGGYCPTVGVGGHFSGG
GYGALMRNYGLAADNIIDAHLVNVDGKVLDRKSMGEDLFW
AIRGGGGENFGIIAAWKIKLVAVPSKSTIFSVKKNMEIHG
LVKLFNKWQNIAYKYDKDLVLMTHFITKNITDNHGKNKTT
VHGYFSSIFHGGVDSLVDLMNKSFPELGIKKTDCKEFSWI
DTTIFYSGVVNFNTANFKKEILLDRSAGKKTAFSIKLDYV
KKPIPETAMVKILEKLYEEDVGAGMYVLYPYGGIMEEISE
SAIPFPHRAGIMYELWYTASWEKQEDNEKHINWVRSVYNF
TTPYVSQNPRLAYLNYRDLDLGKTNHASPNNYTQARIWGE
KYFGKNFNRLVKVKTKVDPNNFFRNEQSIPPLPLRHH

[0307] A non-limiting example of a nucleic acid sequence encoding SEQ ID NO: 155 for expression in S. cerevisiae is:

(SEQ ID NO: 64)
aaccctcaggaaaatttcctgaagtgtttttctcaatata
ttccaactaatgtgacaaacgccaaactcgtttacacgca
acacgatcaattttatatgtccatacttaatagtaccatc
cagaacttgagattcacttcggacacaacaccgaaacccc
tagtcattataactcctttaaatgtaagccatattcaagg
taccatcctatgctcaaagaaagttgggttacagattagg
actcgttcaggaggtcatgatgctgagggcatgtcttaca
tcagtcaagtcccatttgttgtagtggatttgcgaaatat
gcattctataaaaattgacgttcacagtcaaacggcgtgg
gtagaagcaggagctacattaggtgaggtttattactgga
taaatgaaaagaacgaaaacttgagctttccaggcggata
ttgtcctactgtaggtgtgggcggacatttctctggtggt
gggtacggtgcattgatgagaaattatggcttagccgctg
ataatattattgatgcacacctggtcaatgttgacgggaa
agttcttgacagaaagtccatgggggaggatctcttctgg
gctatccgcggtggtggaggtgaaaattttggtattatcg
cagcctggaaaattaaactggtcgctgtcccatcaaagtc
gaccatattttctgttaagaaaaacatggaaattcatgga
ttggttaagctatttaataaatggcagaacattgcatata
agtatgataaagacttagtgctaatgacccatttcataac
taaaaacatcacagataaccacggtaagaataaaacaacc
gtgcatggctacttttcctcaatattccatggaggcgtag
atagtctggtagatcttatgaataagtcttttcccgagct
tgggatcaagaaaaccgactgcaaggaattttcctggatt
gatactacgattttctactcaggtgtagtcaatttcaaca
cggccaattttaaaaaagaaatactgttggacaggtcggc
gggaaagaaaaccgcttttagcatcaagttagactatgtt
aaaaaaccgataccagaaactgccatggttaaaatattgg
agaaattatatgaagaggatgtgggcgcaggtatgtatgt
gctatacccttacggtggaattatggaagaaatttccgaa
agtgctattccgtttcctcatagagctggaataatgtatg
aattgtggtacactgcgtcatgggaaaaacaagaagataa
cgagaagcacattaattgggtaaggagcgtttataatttt
acaacgccttacgtcagtcaaaacccaaggctggcatatt
taaattatcgggatttagacctcggcaaaacaaatcacgc
ctctccaaacaattacacacaagcgagaatatggggtgaa
aagtattttggaaagaatttcaaccgtctagttaaagtca
agactaaggttgatcctaataacttcttcagaaacgaaca
gagcatccccccattgcctttacgtcaccat

[0308] In some embodiments, a THCAS comprises each of: SEQ ID NO: 155; the MFalpha2 signal peptide; and the HDEL signal peptide. In some embodiments, such a THCAS comprises the amino acid sequence shown below, in which signal peptides are underlined and bolded:

(SEQ ID NO: 249)
MKFISTFLTFILAAVSVTANPQENFLKCFSQYIPTNVTNA
KLVYTQHDQFYMSILNSTIQNLRFTSDTTPKPLVIITPLN
VSHIQGTILCSKKVGLQIRTRSGGHDAEGMSYISQVPFVV
VDLRNMHSIKIDVHSQTAWVEAGATLGEVYYWINEKNENL
SFPGGYCPTVGVGGHFSGGGYGALMRNYGLAADNIIDAHL
VNVDGKVLDRKSMGEDLFWAIRGGGGENFGIIAAWKIKLV
AVPSKSTIFSVKKNMEIHGLVKLFNKWQNIAYKYDKDLVL
MTHFITKNITDNHGKNKTTVHGYFSSIFHGGVDSLVDLMN
KSFPELGIKKTDCKEFSWIDTTIFYSGVVNFNTANFKKEI
LLDRSAGKKTAFSIKLDYVKKPIPETAMVKILEKLYEEDV
GAGMYVLYPYGGIMEEISESAIPFPHRAGIMYELWYTASW
EKQEDNEKHINWVRSVYNFTTPYVSQNPRLAYLNYRDLDL
GKTNHASPNNYTQARIWGEKYFGKNFNRLVKVKTKVDPNN
FFRNEQSIPPLPLRHHHDEL.

[0309] A non-limiting example of a nucleic acid sequence encoding SEQ ID NO: 249 is shown below, in which sequences encoding signal peptides are underlined and bolded:

(SEQ ID NO: 242)
atgaagtttatcagtaccttcttgacctttatcttggccg
ctgtctccgtaaccgctaaccctcaggaaaatttcctgaa
gtgtttttctcaatatattccaactaatgtgacaaacgcc
aaactcgtttacacgcaacacgatcaattttatatgtcca
tacttaatagtaccatccagaacttgagattcacttcgga
cacaacaccgaaacccctagtcattataactcctttaaat
gtaagccatattcaaggtaccatcctatgctcaaagaaag
ttgggttacagattaggactcgttcaggaggtcatgatgc
tgagggcatgtcttacatcagtcaagtcccatttgttgta
gtggatttgcgaaatatgcattctataaaaattgacgttc
acagtcaaacggcgtgggtagaagcaggagctacattagg
tgaggtttattactggataaatgaaaagaacgaaaacttg
agctttccaggcggatattgtcctactgtaggtgtgggcg
gacatttctctggtggtgggtacggtgcattgatgagaaa
ttatggcttagccgctgataatattattgatgcacacctg
gtcaatgttgacgggaaagttcttgacagaaagtccatgg
gggaggatctcttctgggctatccgcggtggtggaggtga
aaattttggtattatcgcagcctggaaaattaaactggtc
gctgtcccatcaaagtcgaccatattttctgttaagaaaa
acatggaaattcatggattggttaagctatttaataaatg
gcagaacattgcatataagtatgataaagacttagtgcta
atgacccatttcataactaaaaacatcacagataaccacg
gtaagaataaaacaaccgtgcatggctacttttcctcaat
attccatggaggcgtagatagtctggtagatcttatgaat
aagtcttttcccgagcttgggatcaagaaaaccgactgca
aggaattttcctggattgatactacgattttctactcagg
tgtagtcaatttcaacacggccaattttaaaaaagaaata
ctgttggacaggtcggcgggaaagaaaaccgcttttagca
tcaagttagactatgttaaaaaaccgataccagaaactgc
catggttaaaatattggagaaattatatgaagaggatgtg
ggcgcaggtatgtatgtgctatacccttacggtggaatta
tggaagaaatttccgaaagtgctattccgtttcctcatag
agctggaataatgtatgaattgtggtacactgcgtcatgg
gaaaaacaagaagataacgagaagcacattaattgggtaa
ggagcgtttataattttacaacgccttacgtcagtcaaaa
cccaaggctggcatatttaaattatcgggatttagacctc
ggcaaaacaaatcacgcctctccaaacaattacacacaag
cgagaatatggggtgaaaagtattttggaaagaatttcaa
ccgtctagttaaagtcaagactaaggttgatcctaataac
ttcttcagaaacgaacagagcatccccccattgcctttac
gtcaccatcatgatgaatta.

[0310] In some embodiments, a THCAS comprises the amino acid sequence shown below:

(SEQ ID NO: 158)
NPRENFLKCFSKHIPNNVANPKLVYTQHDQLYMSILNSTIQ
NLRFISDTTPKPLVIVTPSNNSHIQATILCSKKVGLQIRT
RSGGHDAEGMSYISQVPFVVVDLRNMHSIKIDVHSQTAWV
EAGATLGEVYYWINEKNENLSFPGGYCPTVGVGGHFSGGG
YGALMRNYGLAADNIIDAHLVNVDGKVLDRKSMGEDLFWA
IRGGGGENFGIIAAWKIKLVAVPSKSTIFSVKKNMEIHGL
VKLFNKWQNIAYKYDKDLVLMTHFITKNITDNHGKNKTTV
HGYFSSIFHGGVDSLVDLMNKSFPELGIKKTDCKEFSWID
TTIFYSGVVNFNTANFKKEILLDRSAGKKTAFSIKLDYVK
KPIPETAMVKILEKLYEEDVGAGMYVLYPYGGIMEEISES
AIPFPHRAGIMYELWYTASWEKQEDNEKHINWVRSVYNFT
TPYVSQNPRLAYLNYRDLDLGKTNHASPNNYTQARIWGEK
YFGKNFNRLVKVKTKVDPNNFFRNEQSIPPLPPHHH.

[0311] A non-limiting example of a nucleic acid sequence encoding SEQ ID NO: 158 for expression in S. cerevisiae is:

(SEQ ID NO: 67)
aatcctcgagagaactttctgaagtgtttcagcaaacaca
taccaaataatgtagctaacccgaaattggtttacacaca
gcatgatcaactatatatgagtatcttaaattctacgatt
caaaacttgaggtttatttccgacaccactccaaagcctc
ttgtcattgtgactccctcaaacaattcacatatccaagc
gaccatattatgtctaaaaaagttggtttacagatcagaa
cacgttcgggagggcatgatgccgaaggtatgtcctatat
tagtcaagtgccattcgtagttgtcgatctcagaaacatg
cacagcattaagatcgacgtccattctcaaactgcatggg
ttgaagccggcgcaacattgggtgaggtttactattggat
aaatgaaaaaaatgaaaacctctcgtttcccggaggctat
tgtcctacggtaggtgttgggggtcacttctcaggtggag
gctacggcgctctaatgagaaattacggtcttgctgcgga
taatattatagacgcacatctagtgaacgtcgatggcaag
gtgttagatcgcaaatctatgggggaagatttgttttggg
ctatcaggggtggtggaggtgagaatttcggcattattgc
agcatggaagattaaactggtcgccgttccaagtaagtct
actatattttccgtaaaaaaaaatatggaaattcatggac
tggtaaagttgtttaacaaatggcagaacatcgcttataa
atatgataaggacttagttttgatgacccacttcattaca
aagaacataactgataatcatggtaaaaataaaaccactg
tacacggttacttttcctcaatttttcatggaggagtgga
ttcacttgttgacctgatgaacaagagtttccagaattgg
gcatcaaaaaaacagactgcaaggaattttttggatagat
accacaatcttctactcaggtgtcgtgaattttaacactg
ctaattttaaaaaggagattttactagatagatccgcggg
gaagaaaacagcattttcaataaagcttgattatgtaaaa
aaacccattccggaaaccgctatggttaaaatattagaga
agttatatgaagaagatgtcggtgccggaatgtacgttct
ctatccttatggcgggatcatggaggaaatatcggagagc
gctattccattcccccaccgtgccggtattatgtacgaac
tatggtacacagcatcttgggaaaaacaagaggataatga
aaaacatattaattgggtgcggtctgtttataattttacg
accccatatgtgtcacaaaacccaaggttagcctacttga
attatagagacttggacctaggcaagacgaaccacgcttc
tcctaataattatactcaggctcgtatatggggtgaaaag
tacttcggtaagaacttcaatagactggtgaaggtgaaaa
ctaaagttgacccaaacaatttctttagaaatgaacagtc
aatcccccctcttcctcctcatcatcat.

[0312] In some embodiments, a THCAS comprises each of SEQ ID NO: 158; the MFalpha2 signal peptide; and the HDEL signal peptide. In some embodiments, such a THCAS comprises the amino acid sequence shown below, in which signal peptides are underlined and bolded:

(SEQ ID NO: 250)
MKFISTFLTFILAAVSVTANPRENFLKCFSKHIPNNVANP
KLVYTQHDQLYMSILNSTIQNLRFISDTTPKPLVIVTPSN
NSHIQATILCSKKVGLQIRTRSGGHDAEGMSYISQVPFVV
VDLRNMHSIKIDVHSQTAWVEAGATLGEVYYWINEKNENL
SFPGGYCPTVGVGGHFSGGGYGALMRNYGLAADNIIDAHL
VNVDGKVLDRKSMGEDLFWAIRGGGGENFGIIAAWKIKLV
AVPSKSTIFSVKKNMEIHGLVKLFNKWQNIAYKYDKDLVL
MTHFITKNITDNHGKNKTTVHGYFSSIFHGGVDSLVDLMN
KSFPELGIKKTDCKEFSWIDTTIFYSGVVNFNTANFKKEI
LLDRSAGKKTAFSIKLDYVKKPIPETAMVKILEKLYEEDV
GAGMYVLYPYGGIMEEISESAIPFPHRAGIMYELWYTASW
EKQEDNEKHINWVRSVYNFTTPYVSQNPRLAYLNYRDLDL
GKTNHASPNNYTQARIWGEKYFGKNFNRLVKVKTKVDPNN
FFRNEQSIPPLPPHHHHDEL.

[0313] A non-limiting example of a nucleic acid sequence encoding SEQ ID NO: 250 is shown below, in which sequences encoding signal peptides are underlined and bolded:

(SEQ ID NO: 243)
atgaagtttatcagtaccttcttgacctttatcttggccg
ctgtctccgtaaccgctaatcctcgagagaactttctgaa
gtgtttcagcaaacacataccaaataatgtagctaacccg
aaattggtttacacacagcatgatcaactatatatgagta
tcttaaattctacgattcaaaacttgaggtttatttccga
caccactccaaagcctcttgtcattgtgactccctcaaac
aattcacatatccaagcgaccatattatgctctaaaaaag
ttggtttacagatcagaacacgttcgggagggcatgatgc
cgaaggtatgtcctatattagtcaagtgccattcgtagtt
gtcgatctcagaaacatgcacagcattaagatcgacgtcc
attctcaaactgcatgggttgaagccggcgcaacattggg
tgaggtttactattggataaatgaaaaaaatgaaaacctc
tcgtttcccggaggctattgtcctacggtaggtgttgggg
gtcacttctcaggtggaggctacggcgctctaatgagaaa
ttacggtcttgctgcggataatattatagacgcacatcta
gtgaacgtcgatggcaaggtgttagatcgcaaatctatgg
gggaagatttgttttgggctatcaggggtggtggaggtga
gaatttcggcattattgcagcatggaagattaaactggtc
gccgttccaagtaagtctactatattttccgtaaaaaaaa
atatggaaattcatggactggtaaagttgtttaacaaatg
gcagaacatcgcttataaatatgataaggacttagttttg
atgacccacttcattacaaagaacataactgataatcatg
gtaaaaataaaaccactgtacacggttacttttcctcaat
ttttcatggaggagtggattcacttgttgacctgatgaac
aagagtttcccagaattgggcatcaaaaaaacagactgca
aggaattttcttggatagataccacaatcttctactcagg
tgtcgtgaattttaacactgctaattttaaaaaggagatt
ttactagatagatccgcggggaagaaaacagcattttcaa
taaagcttgattatgtaaaaaaacccattccggaaaccgc
tatggttaaaatattagagaagttatatgaagaagatgtc
ggtgccggaatgtacgttctctatccttatggcgggatca
tggaggaaatatcggagagcgctattccattcccccaccg
tgccggtattatgtacgaactatggtacacagcatcttgg
gaaaaacaagaggataatgaaaaacatattaattgggtgc
ggtctgtttataattttacgaccccatatgtgtcacaaaa
cccaaggttagcctacttgaattatagagacttggaccta
ggcaagacgaaccacgcttctcctaataattatactcagg
ctcgtatatggggtgaaaagtacttcggtaagaacttcaa
tagactggtgaaggtgaaaactaaagttgacccaaacaat
ttctttagaaatgaacagtcaatcccccctcttcctcctc
atcatcatcatgatgaatta

[0314] In some embodiments, a THCAS comprises the amino acid sequence shown below:

(SEQ ID NO: 198)
NPQENFLKCFSQYIPTNVTNAKLVYTQHDQFYMSILNSTI
QNLRFTSDTTPKPLVIITPLNVSHIQGTILCSKKVGLQIR
TRSGGHDAEGMSYISQVPFVVVDLRNMHSIKIDVHSQTAW
VEAGATLGEVYYWINEKNENLSFPGGYCPTVGVGGHFSGG
GYGALMRNYGLAADNIIDAHLVNVDGKVLDRKSMGEDLFW
AIRGGGGENFGIIAAWKIKLVAVPSKSTIFSVKKNMEIHG
LVKLFNKWQNIAYKYDKDLVLMTHFITKNITDNHGKNKTT
VHGYFSSIFHGGVDSLVDLMNKSFPELGIKKTDCKEFSWI
DTTIFYSGVVNFNTANFKKEILLDRSAGKKTAFSIKLDYV
KKPIPETAMVKILEKLYEEDVGAGMYVLYPYGGIMEEISE
SAIPFPHRAGIMYELWYTASWEKQEDNEKHINWVRSVYNF
TTPYVSQNPRLAYLNYRDLDLGKTNHASPNNYTQARIWGE
KYFGKNFNRLVKVKTKVDPNNFFRNEQSIPPLPLRHH

[0315] A non-limiting example of a nucleic acid sequence encoding SEQ ID NO: 198 for expression in S. cerevisiae is:

(SEQ ID NO: 107)
aatccacaagagaactttcttaaatgtttctctcagtaca
tcccgacgaatgtcactaacgcgaagttagtttataccca
acatgaccagttctatatgagtatactgaatagcacaatt
caaaacttgcgttttacatcggatactactcctaaaccat
tggtaattatcacccctctcaatgtgtcccacatacaagg
gacaattctatgctctaaaaaggttggtttacaaatccga
acgaggtcaggcggacatgatgcagaaggtatgtcataca
tttcccaagtaccctttgttgtggtcgatttaagaaatat
gcattctataaaaattgacgttcacagtcagacagcctgg
gtagaagctggtgctaccttgggagaagtctattactgga
ttaacgagaagaatgaaaatttaagcttcccaggcggtta
ttgtcccactgttggagtcggtggccactttagcgggggt
ggttatggagcactaatgagaaactacggcctggccgctg
ataacataatcgacgcacatcttgttaatgtagatggtaa
agtactagatcgcaagagtatgggagaagatctattttgg
gccattcgtgggggtggtggagagaatttcggcataattg
ctgcatggaaaataaagcttgttgcggtgccttcaaaatc
cactatcttttctgttaaaaagaacatggaaattcatggc
ttggtcaaattattcaataagtggcaaaatatcgcttata
agtacgacaaagatttggtgctgatgacacactttataac
taagaacattacagacaatcatggtaaaaacaaaaccacc
gtgcacgggtacttttcttcaatttttcatggcggtgtcg
attcgctggtagacttgatgaataaaagcttcccggagtt
aggtattaaaaagactgattgtaaagaattttcttggata
gatactacaattttctattccggagttgtaaactttaata
ctgccaatttcaaaaaagaaatcttacttgacagatctgc
tgggaaaaagacggcattttctataaaattggattacgtt
aagaaaccaatacccgaaaccgcaatggttaaaatcctgg
agaagttatatgaagaagatgtgggagctggtatgtatgt
actatacccatacggtggcataatggaagagatctcagaa
tccgcaatccctttcccacatcgggctggtatcatgtatg
aattatggtatacagccagttgggaaaagcaagaagataa
cgaaaagcatattaactgggtgagatcggtctacaatttt
accactccctatgttagtcaaaaccctagactagcctatt
tgaattatagggacttagatctcggaaaaacgaaccacgc
atcacctaataactacacccaggcgagaatttggggtgag
aagtacttcggtaaaaattttaataggttggtcaaagtta
aaacaaaggttgatcccaacaacttctttcgcaatgagca
atcgattccaccattaccgttgcgacatcat.

[0316] In some embodiments, a THCAS comprises each of: SEQ ID NO: 198; the MFalpha2 signal peptide; and the HDEL signal peptide. In some embodiments, such a THCAS comprises the amino acid sequence shown below, in which signal peptides are underlined and bolded:

(SEQ ID NO: 251)
MKFISTFLTFILAAVSVTANPQENFLKCFSQYIPTNVTNA
KLVYTQHDQFYMSILNSTIQNLRFTSDTTPKPLVIITPLN
VSHIQGTILCSKKVGLQIRTRSGGHDAEGMSYISQVPFVV
VDLRNMHSIKIDVHSQTAWVEAGATLGEVYYWINEKNENL
SFPGGYCPTVGVGGHFSGGGYGALMRNYGLAADNIIDAHL
VNVDGKVLDRKSMGEDLFWAIRGGGGENFGIIAAWKIKLV
AVPSKSTIFSVKKNMEIHGLVKLFNKWQNIAYKYDKDLVL
MTHFITKNITDNHGKNKTTVHGYFSSIFHGGVDSLVDLMN
KSFPELGIKKTDCKEFSWIDTTIFYSGVVNFNTANFKKEI
LLDRSAGKKTAFSIKLDYVKKPIPETAMVKILEKLYEEDV
GAGMYVLYPYGGIMEEISESAIPFPHRAGIMYELWYTASW
EKQEDNEKHINWVRSVYNFTTPYVSQNPRLAYLNYRDLDL
GKTNHASPNNYTQARIWGEKYFGKNFNRLVKVKTKVDPNN
FFRNEQSIPPLPLRHHHDEL

[0317] A non-limiting example of a nucleic acid sequence encoding SEQ ID NO: 251 is shown below, in which sequences encoding signal peptides are underlined and bolded:

(SEQ ID NO: 244)
atgaagtttatcagtaccttcttgacctttatcttggccg
ctgtctccgtaaccgctaatccacaagagaactttcttaa
atgtttctctcagtacatcccgacgaatgtcactaacgcg
aagttagtttatacccaacatgaccagttctatatgagta
tactgaatagcacaattcaaaacttgcgttttacatcgga
tactactcctaaaccattggtaattatcacccctctcaat
gtgtcccacatacaagggacaattctatgctctaaaaagg
ttggtttacaaatccgaacgaggtcaggcggacatgatgc
agaaggtatgtcatacatttcccaagtaccctttgttgtg
gtcgatttaagaaatatgcattctataaaaattgacgttc
acagtcagacagcctgggtagaagctggtgctaccttggg
agaagtctattactggattaacgagaagaatgaaaattta
agcttcccaggcggttattgtcccactgttggagtcggtg
gccactttagcgggggtggttatggagcactaatgagaaa
ctacggcctggccgctgataacataatcgacgcacatctt
gttaatgtagatggtaaagtactagatcgcaagagtatgg
gagaagatctattttgggccattcgtgggggtggtggaga
gaatttcggcataattgctgcatggaaaataaagcttgtt
gcggtgccttcaaaatccactatcttttctgttaaaaaga
acatggaaattcatggcttggtcaaattattcaataagtg
gcaaaatatcgcttataagtacgacaaagatttggtgctg
atgacacactttataactaagaacattacagacaatcatg
gtaaaaacaaaaccaccgtgcacgggtacttttcttcaat
ttttcatggcggtgtcgattcgctggtagacttgatgaat
aaaagcttcccggagttaggtattaaaaagactgattgta
aagaattttcttggatagatactacaattttctattccgg
agttgtaaactttaatactgccaatttcaaaaaagaaatc
ttacttgacagatctgctgggaaaaagacggcattttcta
taaaattggattacgttaagaaaccaatacccgaaaccgc
aatggttaaaatcctggagaagttatatgaagaagatgtg
ggagctggtatgtatgtactatacccatacggtggcataa
tggaagagatctcagaatccgcaatccctttcccacatcg
ggctggtatcatgtatgaattatggtatacagccagttgg
gaaaagcaagaagataacgaaaagcatattaactgggtga
gatcggtctacaattttaccactccctatgttagtcaaaa
ccctagactagcctatttgaattatagggacttagatctc
ggaaaaacgaaccacgcatcacctaataactacacccagg
cgagaatttggggtgagaagtacttcggtaaaaattttaa
taggttggtcaaagttaaaacaaaggttgatcccaacaac
ttctttcgcaatgagcaatcgattccaccattaccgttgc
gacatcatcatgatgaatta.

[0318] In some embodiments, a THCAS comprises the amino acid sequence shown below:

(SEQ ID NO: 200)
ANPRENFLKCFSKHIPNNVANPKLVYTQHDQLYMSILNST
IQNLRFISDTTPKPLVIVTPSNNSHIQATILCSKKVGLQI
RTRSGGHDAEGMSYISQVPFVVVDLRNMHSIKIDVHSQTA
WVEAGATLGEVYYWINEKNENLSFPGGYCPTVGVGGHFSG
GGYGALMRNYGLAADNIIDAHLVNVDGKVLDRKSMGEDLF
WAIRGGGGENFGIIAAWKIKLVAVPSKSTIFSVKKNMEIH
GLVKLFNKWQNIAYKYDKDLVLMTHFITKNITDNHGKNKT
TVHGYFSSIFHGGVDSLVDLMNKSFPELGIKKTDCKEFSW
IDTTIFYSGVVNFNTANFKKEILLDRSAGKKTAFSIKLDY
VKKPIPETAMVKILEKLYEEDVGAGMYVLYPYGGIMEEIS
ESAIPFPHRAGIMYELWYTASWEKQEDNEKHINWVRSVYN
FTTPYVSQNPRLAYLNYRDLDLGKTNHASPNNYTQARIWG
EKYFGKNFNRLVKVKTKVDPNNFFRNEQSIPPLPRHRH

[0319] A non-limiting example of a nucleic acid sequence encoding SEQ ID NO: 200 for expression in S. cerevisiae is:

(SEQ ID NO: 109)
gccaatccccgtgaaaacttcttaaaatgcttttctaagc
acatcccaaataacgtagcaaatcctaaattggtgtatac
acaacatgaccagctttacatgtcaattctaaacagtacg
atacaaaatctgaggtttatttcggataccactccaaagc
cgctcgttatagtcactccatccaataactcacatatcca
ggcgacaattttgtgttctaaaaaagttggtttacaaatt
agaacccggagcggagggcatgatgctgagggcatgtcct
atatctcccaagtccctttcgtagtggttgaccttagaaa
tatgcacagtataaagattgatgtccatagtcagactgcc
tgggttgaagctggtgcaacattaggtgaagtatactatt
ggataaacgaaaagaatgagaacttgtcatttccaggagg
ctactgtcctactgttggagtcggtgggcacttctctggt
ggaggctatggtgctctaatgagaaattacggtttagcag
cggataacattatagacgcccatctggtgaatgttgatgg
taaagttttggaccgaaagtctatgggtgaagatttattt
tgggctattcgtggaggagggggcgagaacttcggaatca
ttgcagcttggaaaataaagttggttgcagtacccagcaa
atcgaccatcttttctgtcaaaaaaaatatggaaattcac
ggcctcgtgaaactttttaataagtggcaaaatattgcgt
ataagtatgataaagatttagttctcatgacacattttat
caccaaaaacatcacggataatcatggtaaaaataagact
acggtccacgggtactttagttcaattttccatggtggtg
ttgattcacttgtagacctaatgaataagtcgttccctga
gttggggataaagaaaacagattgcaaagaattttcctgg
attgacactacgattttctactctggtgttgtcaacttta
acacagctaatttcaaaaaagaaattttgctagataggtc
tgctggcaaaaagacagctttttcaattaaactggactat
gtgaaaaaaccgatcccagaaactgccatggtaaagatat
tagaaaagctgtacgaggaagatgtaggtgcgggtatgta
tgtactatacccttatggcggtataatggaggaaatcagt
gaaagcgcaataccatttccccaccgcgccggcatcatgt
acgagctttggtataccgccagttgggaaaaacaagaaga
taatgagaagcatatcaactgggttagatcagtttataat
ttcactaccccctacgtgtcgcaaaacccacggttggcct
atctaaattatagagacttagatttgggtaaaacaaatca
tgcttcaccaaataactacactcaggctaggatatggggc
gaaaaatacttcggtaagaactttaatagattagttaaag
tcaagacgaaggttgatccgaataatttttttagaaacga
gcaatccattcctcccttaccgagacacagacat.

[0320] In some embodiments, a THCAS comprises each of: SEQ ID NO: 200; the MFalpha2 signal peptide; and the HDEL signal peptide. In some embodiments, such a THCAS comprises the amino acid sequence shown below, in which signal peptides are underlined and bolded:

(SEQ ID NO: 252)
MKFISTFLTFILAAVSVTAANPRENFLKCFSKHIPNNVAN
PKLVYTQHDQLYMSILNSTIQNLRFISDTTPKPLVIVTPS
NNSHIQATILCSKKVGLQIRTRSGGHDAEGMSYISQVPFV
VVDLRNMHSIKIDVHSQTAWVEAGATLGEVYYWINEKNEN
LSFPGGYCPTVGVGGHFSGGGYGALMRNYGLAADNIIDAH
LVNVDGKVLDRKSMGEDLFWAIRGGGGENFGIIAAWKIKL
VAVPSKSTIFSVKKNMEIHGLVKLFNKWQNIAYKYDKDLV
LMTHFITKNITDNHGKNKTTVHGYFSSIFHGGVDSLVDLM
NKSFPELGIKKTDCKEFSWIDTTIFYSGVVNFNTANFKKE
ILLDRSAGKKTAFSIKLDYVKKPIPETAMVKILEKLYEED
VGAGMYVLYPYGGIMEEISESAIPFPHRAGIMYELWYTAS
WEKQEDNEKHINWVRSVYNFTTPYVSQNPRLAYLNYRDLD
LGKTNHASPNNYTQARIWGEKYFGKNFNRLVKVKTKVDPN
NFFRNEQSIPPLPRHRHHDEL

[0321] A non-limiting example of a nucleic acid sequence encoding SEQ ID NO: 252 is shown below, in which sequences encoding signal peptides are underlined and bolded:

(SEQ ID NO: 245)
atgaagtttatcagtaccttcttgacctttatcttggccg
ctgtctccgtaaccgctgccaatccccgtgaaaacttctt
aaaatgcttttctaagcacatcccaaataacgtagcaaat
cctaaattggtgtatacacaacatgaccagctttacatgt
caattctaaacagtacgatacaaaatctgaggtttatttc
ggataccactccaaagccgctcgttatagtcactccatcc
aataactcacatatccaggcgacaattttgtgttctaaaa
aagttggtttacaaattagaacccggagcggagggcatga
tgctgagggcatgtcctatatctcccaagtccctttcgta
gtggttgaccttagaaatatgcacagtataaagattgatg
tccatagtcagactgcctgggttgaagctggtgcaacatt
aggtgaagtatactattggataaacgaaaagaatgagaac
ttgtcatttccaggaggctactgtcctactgttggagtcg
gtgggcacttctctggtggaggctatggtgctctaatgag
aaattacggtttagcagcggataacattatagacgcccat
ctggtgaatgttgatggtaaagttttggaccgaaagtcta
tgggtgaagatttattttgggctattcgtggaggaggggg
cgagaacttcggaatcattgcagcttggaaaataaagttg
gttgcagtacccagcaaatcgaccatcttttctgtcaaaa
aaaatatggaaattcacggcctcgtgaaactttttaataa
gtggcaaaatattgcgtataagtatgataaagatttagtt
ctcatgacacattttatcaccaaaaacatcacggataatc
atggtaaaaataagactacggtccacgggtactttagttc
aattttccatggtggtgttgattcacttgtagacctaatg
aataagtcgttccctgagttggggataaagaaaacagatt
gcaaagaattttcctggattgacactacgattttctactc
tggtgttgtcaactttaacacagctaatttcaaaaaagaa
attttgctagataggtctgctggcaaaaagacagcttttt
caattaaactggactatgtgaaaaaaccgatcccagaaac
tgccatggtaaagatattagaaaagctgtacgaggaagat
gtaggtgcgggtatgtatgtactatacccttatggcggta
taatggaggaaatcagtgaaagcgcaataccatttcccca
ccgcgccggcatcatgtacgagctttggtataccgccagt
tgggaaaaacaagaagataatgagaagcatatcaactggg
ttagatcagtttataatttcactaccccctacgtgtcgca
aaacccacggttggcctatctaaattatagagacttagat
ttgggtaaaacaaatcatgcttcaccaaataactacactc
aggctaggatatggggcgaaaaatacttggtaagaacttt
aatagattagttaaagtcaagacgaaggttgatccgaata
atttttttagaaacgagcaatccattcctcccttaccgag
acacagacatcatgatgaatta.

[0322] In some embodiments, a THCAS comprises the amino acid sequence shown below:

(SEQ ID NO: 203)
NPRENFLKCFSKHIPNNVANPKLVYTQHDQLYMSILNSTI
QNLRFISDTTPKPLVIVTPSNNSHIQATILCSKKVGLQIR
TRSGGHDAEGMSYISQVPFVVVDLRNMHSIKIDVHSQTAW
VEAGATLGEVYYWINEKNENLSFPGGYCPTVGVGGHFSGG
GYGALMRNYGLAADNIIDAHLVNVDGKVLDRKSMGEDLFW
AIRGGGGENFGIIAAWKIKLVDVPSKSTIFSVKKNMEIHG
LVKLFNKWQNIAYKYDKDLVLMTHFITKNITDNHGKNKTT
VHGYFSSIFHGGVDSLVDLMNKSFPELGIKKTDCKEFSWI
DTTIFYSGVVNENTANFKKEILLDRSAGKKTAFSIKLDYV
KKPIPETAMVKILEKLYEEDVGAGMYVLYPYGGIMEEISE
SAIPFPHRAGIMYELWYTASWEKQEDNEKHINWVRSVYNF
TTPYVSQNPRLAYLNYRDLDLGKTNHASPNNYTQARIWGE
KYFGKNFNRLVKVKTKVDPNNFFRNEQSIPPLPPHHH.

[0323] A non-limiting example of a nucleic acid sequence encoding SEQ ID NO: 203 for expression in S. cerevisiae is:

(SEQ ID NO: 112)
aatcctcgtgagaactttctcaaatgcttctccaagcata
tacccaataacgttgcaaatccgaaattggtatatacgca
gcacgaccaactgtacatgtcaatcttaaatagtactatt
caaaaccttcgatttatttcggataccacaccaaagcctt
tggtgatagttactccatctaacaattctcatatccaagc
gacaattttatgtagcaaaaaggtcggcctacagattaga
acccgcagtgggggtcacgatgccgaaggtatgtcctata
tatctcaagtaccattcgtcgtggttgacttaaggaacat
gcattcaattaaaatcgatgtgcactcgcaaactgcttgg
gttgaagctggagcaacgttaggtgaggtatactattgga
ttaatgaaaagaatgaaaatttgtcttttccgggaggtta
ctgtcccaccgttggcgtgggcggtcatttttcaggggga
gggtatggagccctcatgagaaactacggtctagcagctg
ataatataatagacgctcatcttgtcaatgttgatggtaa
agtcctggacagaaaaagcatgggtgaggatctattctgg
gcgatcaggggtggcgggggagaaaattttggcattatcg
ccgcctggaagattaaacttgtcgatgtaccatccaaatc
tacaatattttcagtgaagaagaacatggaaattcatggt
ttggtaaaattattcaacaagtggcagaacatcgcttata
aatatgataaagatttggttctaatgactcattttataac
aaaaaacattacagacaatcacggtaagaataaaactacc
gttcacggatatttcagttcaatcttccatggaggcgttg
attcattggttgatttaatgaacaaatcgtttcctgagct
tggtatcaaaaaaaccgattgcaaggaatttagctggata
gacacaacgattttctactctggtgtagtgaattttaata
cggcaaatttcaagaaggaaatactattagatagaagtgc
tggcaaaaagactgcattttctattaaattagattacgtg
aagaaacccattcctgaaactgccatggttaagattttag
aaaagttgtacgaggaggacgtaggcgcagggatgtatgt
tctgtatccatatggaggtattatggaagaaataagtgag
tctgctattccattcccacatcgtgcgggtatcatgtatg
aactgtggtatactgcatcctgggaaaagcaagaagataa
tgaaaaacacattaactgggttcgcagcgtgtacaatttt
acgacaccgtacgtcagccaaaaccctagactagcttatt
tgaattacagagatcttgacctgggaaaaaccaaccatgc
gtcaccgaataactacacacaggcgcggatatggggcgaa
aagtattttggtaagaacttcaataggttggttaaagtca
aaactaaagtggaccccaataatttttttcgtaatgaaca
atcgatcccacccttacctccacatcaccat.

[0324] In some embodiments, a THCAS comprises each of: SEQ ID NO: 203; the MFalpha2 signal peptide; and the HDEL signal peptide. In some embodiments, such a THCAS comprises the amino acid sequence shown below, in which signal peptides are underlined and bolded:

(SEQ ID NO: 253)
MKFISTFLTFILAAVSVTANPRENFLKCFSKHIPNNVANP
KLVYTQHDQLYMSILNSTIQNLRFISDTTPKPLVIVTPSN
NSHIQATILCSKKVGLQIRTRSGGHDAEGMSYISQVPFVV
VDLRNMHSIKIDVHSQTAWVEAGATLGEVYYWINEKNENL
SFPGGYCPTVGVGGHFSGGGYGALMRNYGLAADNIIDAHL
VNVDGKVLDRKSMGEDLFWAIRGGGGENFGIIAAWKIKLV
DVPSKSTIFSVKKNMEIHGLVKLENKWQNIAYKYDKDLVL
MTHFITKNITDNHGKNKTTVHGYFSSIFHGGVDSLVDLMN
KSFPELGIKKTDCKEFSWIDTTIFYSGVVNFNTANFKKEI
LLDRSAGKKTAFSIKLDYVKKPIPETAMVKILEKLYEEDV
GAGMYVLYPYGGIMEEISESAIPFPHRAGIMYELWYTASW
EKQEDNEKHINWVRSVYNFTTPYVSQNPRLAYLNYRDLDL
GKTNHASPNNYTQARIWGEKYFGKNFNRLVKVKTKVDPNN
FFRNEQSIPPLPPHHHHDEL

[0325] A non-limiting example of a nucleic acid sequence encoding SEQ ID NO: 253 is shown below, in which sequences encoding signal peptides are underlined and bolded:

(SEQ ID NO: 246)
atgaagtttatcagtaccttcttgacctt
tatcttggccgctgtctccgtaaccgct
aatcctcgtgagaactttctcaaatgcttctccaagcatatac
ccaataacgttgcaaatccgaaattggtatatacgcagcacgaccaactg
tacatgtcaatcttaaatagtactattcaaaaccttcgatttatttcgga
taccacaccaaagcctttggtgatagttactccatctaacaattctcata
tccaagcgacaattttatgtagcaaaaaggtcggcctacagattagaacc
cgcagtgggggtcacgatgccgaaggtatgtcctatatatctcaagtacc
attcgtcgtggttgacttaaggaacatgcattcaattaaaatcgatgtgc
actcgcaaactgcttgggttgaagctggagcaacgttaggtgaggtatac
tattggattaatgaaaagaatgaaaatttgtcttttccgggaggttactg
tcccaccgttggcgtgggcggtcatttttcagggggagggtatggagccc
tcatgagaaactacggtctagcagctgataatataatagacgctcatctt
gtcaatgttgatggtaaagtcctggacagaaaaagcatgggtgaggatct
attctgggcgatcaggggtggcgggggagaaaattttggcattatcgccg
cctggaagattaaacttgtcgatgtaccatccaaatctacaatattttca
gtgaagaagaacatggaaattcatggtttggtaaaattattcaacaagtg
gcagaacatcgcttataaatatgataaagatttggttctaatgactcatt
ttataacaaaaaacattacagacaatcacggtaagaataaaactaccgtt
cacggatatttcagttcaatcttccatggaggcgttgattcattggttga
tttaatgaacaaatcgtttcctgagcttggtatcaaaaaaaccgattgca
aggaatttagctggatagacacaacgattttctactctggtgtagtgaat
tttaatacggcaaatttcaagaaggaaatactattagatagaagtgctgg
caaaaagactgcattttctattaaattagattacgtgaagaaacccattc
ctgaaactgccatggttaagattttagaaaagttgtacgaggaggacgta
ggcgcagggatgtatgttctgtatccatatggaggtattatggaagaaat
aagtgagtctgctattccattcccacatcgtgcgggtatcatgtatgaac
tgtggtatactgcatcctgggaaaagcaagaagataatgaaaaacacatt
aactgggttcgcagcgtgtacaattttacgacaccgtacgtcagccaaaa
ccctagactagcttatttgaattacagagatcttgacctgggaaaaacca
accatgcgtcaccgaataactacacacaggcgcggatatggggcgaaaag
tattttggtaagaacttcaataggttggttaaagtcaaaactaaagtgga
ccccaataatttttttcgtaatgaacaatcgatcccacccttacctccac
atcaccatcatgatgaatta.

[0326] In some embodiments, a THCAS comprises the amino acid sequence of any one of SEQ ID NOs: 14, 37-40, 42, 43, 138, 140, 141, 144, 155, 158, 164, 178, 198, 199, 200, 203, 285-313, 474-487, 490, 491, 499, 501, 502, 504, 505, or 553-605.

[0327] In some embodiments, a THCAS comprises the nucleotide sequence of any one of SEQ ID NOs: 27-31, 33, 34, 47, 49, 50, 53, 64, 67, 73, 87, 107, 108, 109, 112, 255-283, 332-345, 348-349, 357, 359, 360, 362, 363, or 411-463.

[0328] In some embodiments, a THCAS comprises a nucleic acid or protein sequence that is at least 5%, at least 10%, at least 15%, at least 20%, at least 25%, at least 30%, at least 35%, at least 40%, at least 45%, at least 50%, at least 55%, at least 60%, at least 65%, at least 70%, at least 71%, at least 72%, at least 73%, at least 74%, at least 75%, at least 76%, at least 77%, at least 78%, at least 79%, at least 80%, at least 81%, at least 82%, at least 83%, at least 84%, at least 85%, at least 86%, at least 87%, at least 88%, at least 89%, at least 90%, at least 91%, at least 92%, at least 93%, at least 94%, at least 95%, at least 96%, at least 97%, at least 98%, at least 99%, or is 100% identical, including all values in between, to one or more of SEQ ID NOs: 14, 20-24, 26-31, 33-34, 37-40, 42, 43, 47, 49, 50, 53, 64, 67, 73, 87, 107, 108, 109, 112, 138, 140, 141, 144, 155, 158, 164, 178, 198, 200, 203, 226-239, 240-253, 255-283, 285-313, 332-345, 348-349, 357, 359-360, 362-363, 411-463, 474-487, 490, 491, 499, 501, 502, 504, 505, or 553-605, or to any TS disclosed in this application. In some embodiments, a THCAS comprises a sequence that is at most 5%, at most 10%, at most 15%, at most 20%, at most 25%, at most 30%, at most 35%, at most 40%, at most 45%, at most 50%, at most 55%, at most 60%, at most 65%, at most 70%, at most 71%, at most 72%, at most 73%, at most 74%, at most 75%, at most 76%, at most 77%, at most 78%, at most 79%, at most 80%, at most 81%, at most 82%, at most 83%, at most 84%, at most 85%, at most 86%, at most 87%, at most 88%, at most 89%, at most 90%, at most 91%, at most 92%, at most 93%, at most 94%, at most 95%, at most 96%, at most 97%, at most 98%, at most 99%, or is 100% identical, including all values in between, to one or more of SEQ ID NOs: 14, 20-24, 26-31, 33-34, 37-40, 42, 43, 47, 49, 50, 53, 64, 67, 73, 87, 107, 108, 109, 112, 138, 140, 141, 144, 155, 158, 164, 178, 194-222, 226-239, 240-253, 255-283, 285-313, 332-345, 348-349, 357, 359-360, 362-363, 370, 373-375, 379, 380, 382, 384-387, 390, 392-394, 396, 400-403, 406-463, 474-487, 490-491, 499, 501-502, 504-505, 512, 515-517, 521-522, 524, 526-529, 532, 534-536, 538, 542-545, 548-605, 698-802, 804-811, 813-815, 820, 824, 826, 828-832, 834, 837-838, 845, 848, 850-851, 876, 884-913, 954-1058, 1060-1067, 1069-1071, 1076, 1078, 1080, 1082, 1084-1088, 1090, 1093-1094, 1101, 1104, 1106-1107, 1132, or 1140-1169 or to any TS disclosed in this application. In some embodiments, a THCAS comprises a sequence that is 5%, 10%, 15%, 20%, 25%, 30%, 35%, 40%, 45%, 50%, 55%, 60%, 65%, 70%, 71%, 72%, 73%, 74%, 75%, 76%, 77%, 78%, 79%, 80%, 81%, 82%, 83%, 84%, 85%, 86%, 87%, 88%, 89%, 90%, 91%, 92%, 93%, 94%, 95%, 96%, 97%, 98%, 99%, or 100% identical, including all values in between, to one or more of SEQ ID NOs: 14, 20-24, 26-31, 33-34, 37-40, 42, 43, 47, 49, 50, 53, 64, 67, 73, 87, 107, 108, 109, 112, 138, 140, 141, 144, 155, 158, 164, 178, 194-222, 226-239, 240-253, 255-283, 285-313, 332-345, 348-349, 357, 359-360, 362-363, 370, 373-375, 379, 380, 382, 384-387, 390, 392-394, 396, 400-403, 406-463, 474-487, 490-491, 499, 501-502, 504-505, 512, 515-517, 521-522, 524, 526-529, 532, 534-536, 538, 542-545, 548-605, 698-802, 804-811, 813-815, 820, 824, 826, 828-832, 834, 837-838, 845, 848, 850-851, 876, 884-913, 954-1058, 1060-1067, 1069-1071, 1076, 1078, 1080, 1082, 1084-1088, 1090, 1093-1094, 1101, 1104, 1106-1107, 1132, or 1140-1169 or to any TS disclosed in this application.

[0329] In some embodiments, a THCAS sequence that is at least 5%, 10%, 15%, 20%, 25%, 30%, 35%, 40%, 45%, 50%, 55%, 60%, 65%, 70%, 71%, 72%, 73%, 74%, 75%, 76%, 77%, 78%, 79%, 80%, 81%, 82%, 83%, 84%, 85%, 86%, 87%, 88%, 89%, 90%, 91%, 92%, 93%, 94%, 95%, 96%, 97%, 98%, 99%, or 100% identical to one or more of SEQ ID NOs: 226-239, or 240-253 includes a signal peptide that comprises SEQ ID NO: 16 or a sequence that has no more than two amino acid substitutions, insertions, additions, or deletions relative to the sequence of SEQ ID NO: 16. In some embodiments, the signal peptide that comprises SEQ ID NO: 16 or a sequence that has no more than two amino acid substitutions, insertions, additions, or deletions relative to the sequence of SEQ ID NO: 16 is located at the N-terminus of the THCAS sequence. For example, the signal peptide that comprises SEQ ID NO: 16 or a sequence that has no more than two amino acid substitutions, insertions, additions, or deletions relative to the sequence of SEQ ID NO: 16 may start at position 2 of the THCAS sequence following a methionine residue.

[0330] In some embodiments, a THCAS sequence that is at least 5%, 10%, 15%, 20%, 25%, 30%, 35%, 40%, 45%, 50%, 55%, 60%, 65%, 70%, 71%, 72%, 73%, 74%, 75%, 76%, 77%, 78%, 79%, 80%, 81%, 82%, 83%, 84%, 85%, 86%, 87%, 88%, 89%, 90%, 91%, 92%, 93%, 94%, 95%, 96%, 97%, 98%, 99%, or 100% identical to one or more of SEQ ID NOs: 226-239, or 240-253 includes a signal peptide that comprises SEQ ID NO: 17 or a sequence that has no more than one amino acid substitution, insertion, addition, or deletion relative to the sequence of SEQ ID NO: 17. In some embodiments, the signal peptide that comprises SEQ ID NO: 17 or a sequence that has no more than one amino acid substitution, insertion, addition, or deletion relative to the sequence of SEQ ID NO: 17 is located at the C-terminus of the sequence that is at least 90% identical to one or more of SEQ ID NOs: 226-239, or 240-253.

[0331] In some embodiments, a THCAS comprises a sequence that is at least 5%, 10%, 15%, 20%, 25%, 30%, 35%, 40%, 45%, 50%, 55%, 60%, 65%, 70%, 71%, 72%, 73%, 74%, 75%, 76%, 77%, 78%, 79%, 80%, 81%, 82%, 83%, 84%, 85%, 86%, 87%, 88%, 89%, 90%, 91%, 92%, 93%, 94%, 95%, 96%, 97%, 98%, 99%, or 100% identical to one or more SEQ ID NOs: 14, 37-40, 42, 43, 138, 140, 141, 144, 155, 158, 164, 178, 198-200, 203, 285-313, 474-487, 490, 491, 499, 501, 502, 504, 505, 512, 515-517, 521-522, 524, 526-529, 532, 534-536, 538, 542-545, 548-605, 698-802, 804-811, 813-815, 820, 824, 826, 828-832, 834, 837-838, 845, 848, 850-851, 876, or 884-913, wherein the sequence is linked to one or more signal peptides. In some embodiments, a signal peptide that comprises SEQ ID NO: 16 or a sequence that has no more than two amino acid substitutions, insertions, additions, or deletions relative to the sequence of SEQ ID NO: 16 is linked to the N-terminus of the sequence that is at least 5%, 10%, 15%, 20%, 25%, 30%, 35%, 40%, 45%, 50%, 55%, 60%, 65%, 70%, 71%, 72%, 73%, 74%, 75%, 76%, 77%, 78%, 79%, 80%, 81%, 82%, 83%, 84%, 85%, 86%, 87%, 88%, 89%, 90%, 91%, 92%, 93%, 94%, 95%, 96%, 97%, 98%, 99%, or 100% identical to one or more of SEQ ID NOs: 14, 37-40, 42, 43, 138, 140, 141, 144, 155, 158, 164, 178, 198-200, 203, 285-313, 474-487, 490, 491, 499, 501, 502, 504, 505, 512, 515-517, 521-522, 524, 526-529, 532, 534-536, 538, 542-545, 548-605, 698-802, 804-811, 813-815, 820, 824, 826, 828-832, 834, 837-838, 845, 848, 850-851, 876, or 884-913. In some embodiments, a methionine residue is added to the N-terminus of SEQ ID NO: 16. In some embodiments, a signal peptide that comprises SEQ ID NO: 17 or a sequence that has no more than one amino acid substitution, insertion, addition, or deletion relative to the sequence of SEQ ID NO: 17 is linked to the carboxyl terminus of the sequence that is at least 5%, 10%, 15%, 20%, 25%, 30%, 35%, 40%, 45%, 50%, 55%, 60%, 65%, 70%, 71%, 72%, 73%, 74%, 75%, 76%, 77%, 78%, 79%, 80%, 81%, 82%, 83%, 84%, 85%, 86%, 87%, 88%, 89%, 90%, 91%, 92%, 93%, 94%, 95%, 96%, 97%, 98%, 99%, or 100% identical to one or more of SEQ ID NOs: 14, 37-40, 42, 43, 138, 140, 141, 144, 155, 158, 164, 178, 198-200, 203, 285-313, 474-487, 490, 491, 499, 501, 502, 504, 505, 512, 515-517, 521-522, 524, 526-529, 532, 534-536, 538, 542-545, 548-605, 698-802, 804-811, 813-815, 820, 824, 826, 828-832, 834, 837-838, 845, 848, 850-851, 876, or 884-913.

[0332] In some embodiments, relative to SEQ ID NO: 14, SEQ ID NO: 284, SEQ ID NO: 20 or SEQ ID NO: 21, a THCAS comprises an amino acid substitution, deletion, or insertion at a residue corresponding to position 1, 2, 3, 4, 5, 6, 8, 10, 12, 13, 14, 15, 16, 17, 18, 19, 20, 21, 22, 23, 24, 26, 27, 28, 29, 30, 31, 33, 34, 35, 37, 39, 41, 48, 49, 51, 55, 58, 60, 61, 62, 70, 72, 74, 75, 76, 81, 88, 89, 91, 94, 97, 100, 101, 102, 104, 105, 106, 108, 110, 111, 112, 113, 114, 115, 116, 117, 119, 122, 123, 125, 127, 130, 132, 133, 135, 137, 138, 139, 140, 141, 142, 145, 147, 149, 150, 164, 165, 168, 169, 172, 173, 175, 176, 177, 180, 181, 183, 184, 185, 187, 193, 201, 208, 209, 212, 214, 215, 217, 222, 225, 226, 227, 229, 231, 233, 235, 236, 238, 239, 241, 242, 243, 244, 245, 246, 247, 250, 251, 253, 254, 255, 256, 257, 260, 261, 262, 263, 264, 265, 266, 267, 268, 269, 270, 271, 272, 273, 274, 275, 277, 278, 279, 281, 282, 283, 284, 286, 287, 288, 290, 292, 293, 294, 295, 297, 298, 299, 301, 302, 309, 310, 311, 312, 315, 317, 322, 323, 324, 326, 327, 328, 329, 330, 331, 332, 333, 334, 335, 336, 337, 338, 339, 340, 341, 344, 346, 347, 348, 349, 350, 351, 352, 353, 354, 355, 357, 361, 362, 365, 366, 368, 369, 370, 371, 372, 373, 374, 376, 377, 379, 380, 381, 382, 383, 384, 385, 386, 387, 389, 394, 396, 401, 402, 411, 412, 414, 415, 416, 418, 419, 420, 422, 423, 424, 425, 426, 427, 428, 429, 430, 431, 432, 433, 434, 436, 437, 439, 440, 441, 447, 448, 451, 452, 459, 461, 463, 464, 465, 467, 468, 469,470, 471, 473, 474, 477, 484,485, 488, 492, 496, 497, 500, 505, 511, 513, 514, 515, 516, and/or 517 in SEQ ID NO: 14, SEQ ID NO: 284, SEQ ID NO: 20 or SEQ ID NO: 21. In some embodiments, a THCAS comprises the amino acid residue that is present in positions 14, 37-43, 141, 144, 155, 158, 198, 200 or 203 of SEQ ID NO: 14 at a position corresponding to position 1, 2, 3, 4, 5, 6, 8, 10, 12, 13, 14, 15, 16, 17, 18, 19, 20, 21, 22, 23, 24, 26, 27, 28, 29, 30, 31, 33, 34, 35, 37, 39, 41, 48, 49, 51, 55, 58, 60, 61, 62, 70, 72, 74, 75, 76, 81, 88, 89, 91, 94, 97, 100, 101, 102, 104, 105, 106, 108, 110, 111, 112, 113, 114, 115, 116, 117, 119, 122, 123, 125, 127, 130, 132, 133, 135, 137, 138, 139, 140, 141, 142, 145, 147, 149, 150, 164, 165, 168, 169, 172, 173, 175, 176, 177, 180, 181, 183, 184, 185, 187, 193, 201, 208, 209, 212, 214, 215, 217, 222, 225, 226, 227, 229, 231, 233, 235, 236, 238, 239, 241, 242, 243, 244, 245, 246, 247, 250, 251, 253, 254, 255, 256, 257, 260, 261, 262, 263, 264, 265, 266, 267, 268, 269, 270, 271, 272, 273, 274, 275, 277, 278, 279, 281, 282, 283, 284, 286, 287, 288, 290, 292, 293, 294, 295, 297, 298, 299, 301, 302, 309, 310, 311, 312, 315, 317, 322, 323, 324, 326, 327, 328, 329, 330, 331, 332, 333, 334, 335, 336, 337, 338, 339, 340, 341, 344, 346, 347, 348, 349, 350, 351, 352, 353, 354, 355, 357, 361, 362, 365, 366, 368, 369, 370, 371, 372, 373, 374, 376, 377, 379, 380, 381, 382, 383, 384, 385, 386, 387, 389, 394, 396, 401, 402, 411, 412, 414, 415, 416,418, 419, 420, 422, 423, 424, 425, 426, 427, 428, 429, 430, 431, 432, 433, 434, 436, 437, 439, 440, 441, 447, 448, 451, 452, 459, 461, 463, 464, 465, 467, 468, 469, 470, 471, 473, 474, 477, 484, 485, 488, 492, 496, 497, 500, 505, 511, 513, 514, 515, 516, and/or 517 in SEQ ID NO: 21.

[0333] Additional non-limiting examples of THCAS enzymes may also be found in U.S. Pat. No. 9,512,391 and U.S. Patent Publication No. 2018/0179564, which are incorporated by reference in this application in their entireties.

[0334] In some embodiments, a THCAS comprises an amino acid deletion or substitution at a residue corresponding to a position shown in Table 17, Table 18, or Table 19.

[0335] In some embodiments, a THCAS comprises an amino acid substitution, addition, deletion or insertion at a residue corresponding to position 31, 36, 40, 41, 44, 46, 47, 49, 51, 52, 56, 58, 59, 61, 63, 74, 76, 85, 88, 89, 90, 95, 96, 100, 103, 116, 129, 136, 143, 150, 158, 173, 181, 196, 211, 237, 242, 247, 250, 255, 257, 267, 268, 273, 274, 288, 290, 296, 302, 309, 311, 318, 329, 340, 344, 345, 351, 354, 360, 361, 363, 377, 378, 379, 382, 396, 411, 417, 419, 424, 425, 430, 443, 446, 447, 459, 462, 464, 465, 469, 475, 479, 489, 491, 492, 493, 494, 495, 496, 499, 516, 524, 528, 542, 543, and/or 544 in SEQ ID NO: 14.

[0336] In some embodiments, the THCAS comprises the amino acid Q at a residue corresponding to position 31 in SEQ ID NO: 14; the amino acid H or Q at a residue corresponding to position 36 in SEQ ID NO: 14; the amino acid E or Q at a residue corresponding to position 40 in SEQ ID NO: 14; the amino acid Y at a residue corresponding to position 41 in SEQ ID NO: 14, the amino acid T at a residue corresponding to position 44 in SEQ ID NO: 14; the amino acid A or P at a residue corresponding to position 46 in SEQ ID NO: 14; the amino acid T at a residue corresponding to position 47 in SEQ ID NO: 14; the amino acid A at a residue corresponding to position 49 in SEQ ID NO: 14; the amino acid F at a residue corresponding to position 51 in SEQ ID NO: 14; the amino acid I at a residue corresponding to position 52 in SEQ ID NO: 14; the amino acid N at a residue corresponding to position 56 in SEQ ID NO: 14, the amino acid P or S at a residue corresponding to position 58 in SEQ ID NO: 14; the amino acid F at a residue corresponding to position 59 in SEQ ID NO: 14; the amino acid S at a residue corresponding to position 61 in SEQ ID NO: 14; the amino acid L or V at a residue corresponding to position 63 in SEQ ID NO: 14; the amino acid T at a residue corresponding to position 74 in SEQ ID NO: 14; the amino acid N at a residue corresponding to position 76 in SEQ ID NO: 14; the amino acid I at a residue corresponding to position 85 in SEQ ID NO: 14; the amino acid L at a residue corresponding to position 88 in SEQ ID NO: 14; the amino acid D, E, or H at a residue corresponding to position 89 in SEQ ID NO: 14; the amino acid E or V at a residue corresponding to position 90 in SEQ ID NO: 14; the amino acid G at a residue corresponding to position 95 in SEQ ID NO: 14; the amino acid S at a residue corresponding to position 96 in SEQ ID NO: 14; the amino acid A at a residue corresponding to position 100 in SEQ ID NO: 14; the amino acid I at a residue corresponding to position 103 in SEQ ID NO: 14; the amino acid S at a residue corresponding to position 116 in SEQ ID NO: 14; the amino acid I at a residue corresponding to position 129 in SEQ ID NO: 14; the amino acid R at a residue corresponding to position 136 in SEQ ID NO: 14; the amino acid E at a residue corresponding to position 143 in SEQ ID NO: 14; the amino acid Q at a residue corresponding to position 150 in SEQ ID NO: 14, the amino acid L at a residue corresponding to position 158 in SEQ ID NO: 14; the amino acid A at a residue corresponding to position 173 in SEQ ID NO: 14; the amino acid A at a residue corresponding to position 181 in SEQ ID NO: 14; the amino acid K at a residue corresponding to position 196 in SEQ ID NO: 14; the amino acid D at a residue corresponding to position 211 in SEQ ID NO: 14; the amino acid S at a residue corresponding to position 237 in SEQ ID NO: 14; the amino acid V at a residue corresponding to position 242 in SEQ ID NO: 14; the amino acid R at a residue corresponding to position 247 in SEQ ID NO: 14; the amino acid D or P at a residue corresponding to position 250 in SEQ ID NO: 14; the amino acid V at a residue corresponding to position 255 in SEQ ID NO: 14; the amino acid M or R at a residue corresponding to position 257 in SEQ ID NO: 14; the amino acid N at a residue corresponding to position 267 in SEQ ID NO: 14; the amino acid E at a residue corresponding to position 268 in SEQ ID NO: 14; the amino acid V at a residue corresponding to position 273 in SEQ ID NO: 14; the amino acid H at a residue corresponding to position 274 in SEQ ID NO: 14; the amino acid L, M, or T at a residue corresponding to position 288 in SEQ ID NO: 14; the amino acid F at a residue corresponding to position 290 in SEQ ID NO: 14; the amino acid R at a residue corresponding to position 296 in SEQ ID NO: 14; the amino acid Q at a residue corresponding to position 302 in SEQ ID NO: 14; the amino acid I at a residue corresponding to position 309 in SEQ ID NO: 14; the amino acid S at a residue corresponding to position 311 in SEQ ID NO: 14; the amino acid L at a residue corresponding to position 318 in SEQ ID NO: 14; the amino acid Q at a residue corresponding to position 329 in SEQ ID NO: 14; the amino acid E at a residue corresponding to position 340 in SEQ ID NO: 14; the amino acid Q at a residue corresponding to position 344 in SEQ ID NO: 14; the amino acid L or M at a residue corresponding to position 345 in SEQ ID NO: 14; the amino acid I at a residue corresponding to position 351 in SEQ ID NO: 14; the amino acid F at a residue corresponding to position 354 in SEQ ID NO: 14; the amino acid Y at a residue corresponding to position 360 in SEQ ID NO: 14; the amino acid D at a residue corresponding to position 361 in SEQ ID NO: 14; the amino acid T at a residue corresponding to position 363 in SEQ ID NO: 14; the amino acid Q at a residue corresponding to position 377 in SEQ ID NO: 14; the amino acid N at a residue corresponding to position 378 in SEQ ID NO: 14; the amino acid A at a residue corresponding to position 379 in SEQ ID NO: 14; the amino acid K at a residue corresponding to position 382 in SEQ ID NO: 14, the amino acid V at a residue corresponding to position 396 in SEQ ID NO: 14; the amino acid V at a residue corresponding to position 411 in SEQ ID NO: 14; the amino acid V at a residue corresponding to position 417 in SEQ ID NO: 14; the amino acid F at a residue corresponding to position 419 in SEQ ID NO: 14; the amino acid D at a residue corresponding to position 424 in SEQ ID NO: 14; the amino acid K at a residue corresponding to position 425 in SEQ ID NO: 14; the amino acid T at a residue corresponding to position 430 in SEQ ID NO: 14; the amino acid I or V at a residue corresponding to position 443 in SEQ ID NO: 14; the amino acid I at a residue corresponding to position 446 in SEQ ID NO: 14; the amino acid C at a residue corresponding to position 447 in SEQ ID NO: 14; the amino acid L at a residue corresponding to position 459 in SEQ ID NO: 14; the amino acid I at a residue corresponding to position 462 in SEQ ID NO: 14; the amino acid N at a residue corresponding to position 464 in SEQ ID NO: 14; the amino acid I at a residue corresponding to position 465 in SEQ ID NO: 14; the amino acid M at a residue corresponding to position 469 in SEQ ID NO: 14; the amino acid K at a residue corresponding to position 475 in SEQ ID NO: 14; the amino acid M at a residue corresponding to position 479 in SEQ ID NO: 14, the amino acid I at a residue corresponding to position 489 in SEQ ID NO: 14; the amino acid I or M at a residue corresponding to position 491 in SEQ ID NO: 14; the amino acid N at a residue corresponding to position 492 in SEQ ID NO: 14; the amino acid D at a residue corresponding to position 493 in SEQ ID NO: 14; the amino acid D, E, F, or P at a residue corresponding to position 494 in SEQ ID NO: 14; the amino acid E or K at a residue corresponding to position 495 in SEQ ID NO: 14; the amino acid N at a residue corresponding to position 496 in SEQ ID NO. 14; the amino acid Q at a residue corresponding to position 499 in SEQ ID NO: 14; the amino acid D at a residue corresponding to position 516 in SEQ ID NO: 14; the amino acid L at a residue corresponding to position 524 in SEQ ID NO: 14; the amino acid D at a residue corresponding to position 528 in SEQ ID NO: 14; the amino acid at a residue corresponding to position in SEQ ID NO: 14; the amino acid L or R at a residue corresponding to position 542 in SEQ ID NO: 14; the amino acid R at a residue corresponding to position 543 in SEQ ID NO: 14; and/or the amino acid R at a residue corresponding to position 544 in SEQ ID NO: 14.

[0337] In some embodiments, the THCAS comprises any of the combinations of amino acid substitutions shown in Table 17, Table 18, or Table 19.

[0338] In some embodiments, a THCAS comprises relative to SEQ ID NO: 14: R31Q, H56N, I74T, N90V, A250P, S255V, Q475K, T492N, H494E, and A495E; R31Q, M61S, I74T, N90V, A250P, S255V, T492N, and H494E; R31Q, K40Q, H41Y, I74T, N90V, V1291, V288L, K296R, F345L, F360Y, A411V, E424D, H494P, and A495E; R31Q, K40Q, H41Y, 174T, N90V, V129I, V288L, K296R, F345L, F360Y, A411V, E424D, H494P, and A495E; R31Q, K40Q, H41Y, I74T, N90V, V1291, V288L, K296R, F345L, F360Y, A411V, E424D, H494P, and A495E; R31Q, K40Q, H41Y, I74T, N90V, V1291, V288L, K296R, F345L, F360Y, A411V, E424D, H494P, A495E, and Y419F; R31Q, K40Q, H41Y, H56N, I74T, N90V, V129I, V288L, K296R, F345L, F360Y, A411V, E424D, Q475K, H494P, and A495E; R31Q, K40Q, H41Y, I74T, N90V, V129I, S255V, V288L, K296R, T340E, F345L, F360Y, A411V, E424D, Q475K, T492N, H494P, and A495E; R31Q, K40Q, H41Y, V46P, V52I, H56N, M61S, I74T, N90V, V1291, S255V, V288L, K296R, T340E, F345L, F360Y, A411V, E424D, Q475K, T492N, H494P, and A495E; or R31Q, K40Q, H41Y, I74T, N90V, V1291, V288L, K296R, F345L, F360Y, A411V, E424D, H494P, and A495E.

[0339] In some embodiments, a THCAS comprises relative to SEQ ID NO: 14: R31Q, K40Q, H41Y, N44T, A47T, P49A, L59F, I74T, V85I, S88L, N90V, A95G, P542L, and H543R; R31Q, K40Q, H41Y, I74T, N90V, V129I, V288L, K296R, F345L, F360Y, A411V, E424D, H494P, and A495E; R31Q, K40Q, H41Y, N44T, A47T, P49A, L59F, I74T, V851, S88L, N90V, A95G, P542L, and H543R; R31Q, K40Q, H41 Y, I74T, N90V, V1291, V288L, K296R, F345L, F360Y, A411V, E424D, H494P, and A495E; R31Q, K40Q, H41Y, I74T, N90V, V1291, V288L, K296R, F345L, F360Y, A411V, E424D, H494P, and A495E; R31Q, K40Q, H41Y, 174T, N90V, V1291, V288L, K296R, F345L, F360Y, A411V, E424D, H494P, and A495E; R31Q, K40Q, H41Y, I74T, N90V, V129I, V288L, K296R, F345L, F360Y, A411V, E424D, H494P, and A495E; R31Q, I74T, N90V, A250D, S255V, T492N, and H494E; I74T, N90V, A250P, and H494E; M61S, N90V, A250D, S255V, Q475K, T492N, and A495E; R31Q, K40Q, H41Y, V46P, H56N, Q58S, M61S, I74T, N90V, V129I, H143E, S255V, V288L, K296R, T340E, F345L, Y354F, F360Y, A411V, E424D, Q475K, T492N, H494P, and A495E; R31Q174T, N90V, A250D, and S255V; R3 1Q, H56N, I74T, N90V, A250P, S255V, Q475K, T492N, H494E, and A495E; R31Q, K40Q, H41Y, I74T, N90V, V129I, V288L, K296R, F345L, F360Y, A411V, E424D, H494P, and A495E; or R31 Q, K40Q, H41Y, H56N, I74T, N90V, V129I, V288L, K296R, F345L, F360Y, A411V, E424D, Q475K, H494P, and A495E; A250D, S255V, and H494E; H56N, I74T, N90V, A250D, S255V, T492N, and H494E; H56N, M61S, I74T, N90V, A250P, S255V, T492N, and H494E; I74T, N90V, A250D, S255V, E424D, T492N, and A495E; I74T, N90V, A250D, S255V, and H494E; I74T, N90V, A250P, S255V, E424D, T492N, H494E, and A495E; M61S, I74T, N90V, A250D, S255V, Q475K, T492N, H494E, and A495E; M61S, I74T, N90V, A250P, S255V, E424D, T492N, and H494E; M61S, I74T, N90V, A250P, S255V, Q475K, T492N, and H494E; M61S, I74T, N90V, H143E, A250P, S255V, Q475K, T492N, H494E, and A495E; N90V, A250D, S255V, Q475K, T492N, H494E, and A495E; N90V, A250P, S255V, Q475K, T492N, and H494E; R31Q, H56N, M61S, I74T, N90V, A250P, S255V, T492N, H494E, and A495E; R31Q, K40Q, H41Y, I74T, D76N, N90V, V129I, V158L, V288L, K296R, T340E, F345L, Y354F, F360Y, A411V, E424D, H494P, and A495E; R31Q, K40Q, H41Y, 174T, N89D, N90V, V129I, H143E, V288L, K296R, F345L, F360Y, A411V, E424D, H494P, and A495E; R31Q, K40Q, H41Y, I74T, N90V, S100A, V1291, H143E, V288L, K296R, F345L, T351I, F360Y, A411V, E424D, T492N, H494P, and A495E; R31Q, K40Q, H41Y, I74T, N90V, V129I, H143E, S255V, V288L, K296R, F345L, F360Y, A411V, E424D, H494P, and A495E; R31Q, K40Q, H41Y, I74T, N90V, V129L, S255V, V288L, K296R, F345L, F360Y, A411V, E424D, T4461, H494P, and A495E; R31Q, K40Q, H41Y, 174T, N90V, V1291, S255V, V288L, K296R, F345L, T3511, F360Y, A411V, E424D, H494P, and A495E; R31Q, K40Q, H41Y, I74T, N90V, V1291, S255V, V288L, K296R, T340E, F345L, F360Y, A411V, E424D, Q475K, T492N, H494P, and A495E; R31Q, K40Q, H41Y, I74T, N90V, V1291, V288L, K296R, F345L, F360Y, A411V, E424D, H494P, and A495E; R31Q, K40Q, H41Y, I74T, N90V, V129I, V288L, K296R, F345L, F360Y, A411V, E424D, H494P, A495E, and H267N; R31Q, K40Q, H41Y, 174T, N90V, V129L, V288L, K296R, F345L, F360Y, A411V, E424D, H494P, A495E, and K491M; R31Q, K40Q, H41Y, I74T, N90V, V1291, V288L, K296R, F345L, F360Y, A411V, E424D, H494P, A495E, and S255V; R31Q, K40Q, H41Y, I74T, N90V, V129I, V288L, K296R, F345L, F360Y, A411V, E424D, H494P, A495E, and Y417V; R31Q, K40Q, H41Y, I74T, N90V, V1291, V288L, K296R, F345L, F360Y, A411V, E424D, H494P, A495E, and Y419F; R31Q, K40Q, H41Y, M61S, I74T, N90V, V1291, S255V, V288L, K296R, F345L, F360Y, A411V, E424D, H494P, and A495E; R31Q, K40Q, H41Y, N44T, A47T, P49A, L59F, I74T, V85I, S88L, N90V, A95G, P542L, and H543R; R31Q, K40Q, H41Y, N44T, A47T, P49A, L59F, I74T, V85I, S88L, N90V, A95G, S255V, T340E, Q475K, T492N, H494E, A495E, P542L, and H543R; R31Q, K40Q, H41Y, N44T, A47T, P49A, L59F, M61S, I74T, V85I, S88L, N90V, A95G, H143E, S255V, E424D, T492N, H494E, P542L, and H543R; R31Q, K40Q, H41Y, N44T, A47T, P49A, L59F, M61S, I74T, V85I, S88L, N90V, A95G, H143E, S255V, T340E, E424D, T492N, H494E, A495E, P542L, and H543R, R31Q, K40Q, H41Y, N44T, A47T, P49A, L59F, M61S, I74T, V85I, S88L, N90V, A95G, S255V, T340E, T492N, H494E, A495E, P542L, and H543R; R31Q, K40Q, H41Y, N44T, V46P, A47T, P49A, H56N, Q58S, L59F, M61S, I74T, V85I, S88L, N90V, A95G, H143E, S255V, Q475K, T492N, H494E, A495E, P542L, and H543R; R31Q, K40Q, H41Y, Q58S, I74T, N90V, V129I, H143E, S255V, V288L, K296R, F345L, F360Y, A411V, E424D, T492N, H494P, and A495E; R31Q, K40Q, H41Y, Q58S, I74T, N90V, V129I, S255V, V288L, K296R, F345L, F360Y, A411V, E424D, Q475K, T492N, H494P, and A495E; R31Q, K40Q, H41Y, Q58S, M61S, I74T, N90V, V129L, H143E, S255V, V288L, K296R, T340E, F345L, F360Y, A411V, E424D, T492N, H494P, and A495E; R31Q, K40Q, H41Y, V46P, H56N, Q58S, M61S, I74T, N90V, V1291, S255V, V288L, K296R, F345L, F360Y, A411V, E424D, T492N, H494P, and A495E; R31Q, K40Q, H41Y, V46P, I74T, N90V, V1291, V288L, K296R, T340E, F345L, F360Y, A411V, E424D, H494P, and A495E; R31Q, K40Q, H41Y, V46P, Q58S, I74T, N90V, V129I, S255V, V288L, K296R, F345L, F360Y, A411V, E424D, T492N, H494P, and A495E; R31Q, K40Q, H41Y, V46P, Q58S, I74T, N90V, V129I, S255V, V288L, K296R, T340E, F345L, F360Y, A411V, E424D, Q475K, T492N, H494P, and A495E; R31Q, K40Q, H41Y, V46P, V52I, H56N, M61S, I74T, N90V, V1291, S255V, V288L, K296R, T340E, F345L, F360Y, A411V, E424D, Q475K, T492N, H494P, and A495E; R31Q, K40Q, H41Y, V46P, V52I, H56N, Q58S, M61S, 174T, N90V, V1291, H143E, S255V, V288L, K296R, F345L, T3511, F360Y, A411V, E424D, Q475K, T492N, H494P, and A495E; R31Q, K40Q, H41Y, V46P, V52I, H56N, Q58S, M61S, 174T, N90V, V1291, S255V, V288L, K296R, F345L, F360Y, A411V, E424D, Q475K, T492N, H494P, and A495E; R31Q, K40Q, H41Y, V52I, M61S, I74T, N90V, V129I, S255V, V288L, K296R, T340E, F345L, F360Y, A411V, E424D, Q475K, T492N, H494P, and A495E; R31Q, M61S, I74T, N90V, A250P, S255V, E424D, Q475K, T492N, and H494E; R31Q, M61S, I74T, N90V, A250P, S255V, Q475K, T492N, H494E, and A495E; R31Q, M61S, I74T, N90V, A250P, S255V, T492N, and H494E; R31Q, V46P, I74T, N90V, A250D, S255V, E424D, Q475K, T492N, H494E, and A495E; R31Q, V46P, I74T, N90V, A250D, S255V, Q475K, T492N, and H494E; R31Q, V46P, M61S, I74T, N90V, A250P, S255V, T492N, H494E, and A495E; V46P, H56N, I74T, N90V, A250P, S255V, Q475K, T492N, H494E, and A495E; V46P, 174T, N90V, A250D, and S255V; V46P, M61 S, I74T, N90V, A250D, S255V, E424D, Q475K, T492N, H494E, and A495E; or V46P, M61S, I74T, N90V, A250P, S255V, T492N, and H494E.

[0340] In some embodiments, a THCAS comprises relative to SEQ ID NO: 14: R31Q, A47T, H56N, Q58S, M61S, I74T, N90V, H143E, A250P, S255V, V288L, T340E, F345L, E424D, Q475K, and T492N; R31Q, H56N, Q58S, M61S, 174T, N90V, H143E, A250P, S255V, V288L, T340E, F345L, E424D, Q475K, and T492N; R31Q, A47T, V52I, H56N, Q58S, M61S, I74T, N90V, H143E, A250P, S255V, V288L, T340E, F345L, Q475K, and T492N; A47T, H56N, Q58S, M61S, I74T, N90V, A250D, S255V, F345L, Q475K, and T492N; R31Q, A47T, H56N, Q58S, M61S, I74T, N90V, H143E, A250P, S255V, V288L, T340E, F345L, Q475K, and T492N; R31Q, A47T, H56N, Q58S, M61S, 174T, N90V, A250P, S255V, T340E, F345L, E424D, Q475K, and T492N; R31Q, A47T, H56N, Q58S, M61S, I74T, N90V, H143E, A250P, S255V, T340E, F345L, Q475K, and T492N; R31Q, V52I, H56N, Q58S, M61S, I74T, N90V, A250P, S255V, V288L, F345L, Q475K, and T492N; A47T, H56N, Q58S, M61S, 74T, N90V, A250D, S255V, F345L, E424D, Q475K, and T492N; R31Q, H56N, Q58S, M61S, I74T, N90V, A250P, S255V, V288L, F345L, E4241D, Q475K, and T492N; H56N, Q58S, M61 S, 174T, N90V, H143E, A250D, S255V, V288L, F345L, Q475K, T492N, and A495E; H56N, Q58S, M61S, I74T, N90V, H143E, A2501D, S255V, V288L, F345L, Q475K, and T492N; R31Q, A47T, H56N, Q58S, M61 S, 174T, N90V, A250P, S255V, V288L, T340E, F345L, Q475K, and T492N; R31Q, H56N, Q58S, M61S, 174T, N90V, H143E, A250P, S255V, V288L, Q475K, and T492N; A47T, H56N, Q58S, M61IS, I74T, N90V, A2501, S255V, V288L, F345L, Q475K, and T492N; or R31Q, V52L H56N, M61S, 174T, N90V, A250P, S255V, F345L, Q475K, and T492N.

TABLE 3
Mutations in C. sativa THCAS that demonstrated
increased THCA titer either alone or in combination

| Residue in SEQ | | | | |
|---|---|---|---|---|
| ID NO: 14 | | | | |
| (UniProt | | | | |
| Q8GTB6) | Amino Acid Substitutions | | | |
| R31 | Q | | | |
| K36 | H | Q | | |
| K40 | Q | E | | |
| H41 | Y | | | |
| N44 | I | | | |
| V46 | P | A | | |
| A47 | T | | | |
| P49 | A | | | |
| L51 | F | | | |
| V52 | I | | | |
| H56 | N | | | |
| Q58 | S | P | | |
| L59 | F | | | |
| M61 | S | | | |
| I63 | L | V | | |
| I74 | T | | | |
| D76 | N | | | |
| V85 | I | | | |
| S88 | L | | | |
| N89 | D | E | H | |
| N90 | V | E | | |
| A95 | G | | | |
| T96 | S | | | |
| S100 | A | | | |
| V103 | I | | | |
| A116 | S | | | |
| V129 | I | | | |
| H136 | R | | | |
| H143 | E | | | |
| E150 | Q | | | |
| V158 | L | | | |
| G173 | A | | | |
| V181 | A | | | |
| N196 | K | | | |
| N211 | D | | | |
| N237 | S | | | |
| A242 | V | | | |
| K247 | R | | | |
| A250 | D | P | | |
| S255 | V | | | |
| I257 | M | R | | |
| H267 | N | | | |
| G268 | E | | | |
| F273 | V | | | |
| N274 | H | | | |
| V288 | L | M | T | |
| M290 | F | | | |
| K296 | R | | | |
| H302 | Q | | | |
| V309 | I | | | |
| G311 | S | | | |
| H318 | L | | | |
| N329 | Q | | | |
| T340 | E | | | |
| E344 | Q | | | |
| F345 | L | M | | |
| T351 | I | | | |
| Y354 | F | | | |
| F360 | Y | | | |
| N361 | D | | | |
| A363 | T | | | |
| K377 | Q | | | |
| K378 | N | | | |
| T379 | A | | | |
| S382 | K | | | |
| A396 | V | | | |
| A411 | V | | | |
| Y417 | V | | | |
| Y419 | F | | | |
| E424 | D | | | |
| L443 | I | | | |
| T446 | I | | | |
| I459 | L | | | |
| V462 | I | | | |
| S464 | N | | | |
| T469 | M | | | |
| L479 | M | | | |
| Q475 | K | | | |
| K491 | M | | | |
| T492 | N | | | |
| H494 | E | P | F | D |
| A495 | E | K | | |
| N499 | Q | | | |
| N528 | D | | | |
| P542 | L | R | | |
| H543 | R | | | |
| H544 | R | | | |

[0341] In some embodiments, one or more amino acid substitutions at particular residues relative to SEQ ID NO: 14 may change the polarity of the residue and alter the stability and/or functionality of a THCAS. Without wishing to be bound by theory, mutations that map to the surface of the tertiary structure of THCAS may, alone or in combination, help solubilize or stabilize the enzyme and result in increased THCA and/or THCVA titer. In some embodiments, one or more amino acid substitutions include K40Q, V52L, H56N, A250D, V288L, T340E, F345L, F360Y, Y419F, E424D, Q475K, T492N, and/or H494E relative to SEQ ID NO: 14. In some embodiments, an amino acid substitution at residue K40 relative to SEQ ID NO. 14 affects the polarity of the residue. For example, the amino acid substitution K40Q relative to SEQ ID NO: 14 switches the residue from a positively charged polar residue to an uncharged polar residue. In some embodiments, an amino acid substitution at residue T340 relative to SEQ ID NO: 14 impacts the polarity of the residue. For example, an amino acid substitution T340E relative to SEQ ID NO: 14 switches the residue from an uncharged polar residue to a negatively charged polar residue, which may favorably counteract the charge of the neighboring positive residues on the surface of the protein (K338, K339, and K343).

[0342] In some embodiments, one or more amino acid substitutions increases the product specificity of the THCAS, such as the specificity for a compound of Formula (10), THCA, THCVA or a combination thereof, as compared to a THCAS without such a substitution. In some embodiments, one or more amino acid substitutions increases the product specificity of THCVA. In some embodiments, the one or more amino acid substitutions include: N44T, A47T, P49A, Q58S, L59F, V85I, S88L, A95G, H143E, A250D, Y354F, P542L, and/or H543R relative to SEQ ID NO: 14. In some embodiments, the amino acid at residue Y354 relative to SEQ ID NO: 14 may directly interact with THCA or THCVA. An amino acid substitution at residue Y354 relative to SEQ ID NO: 14 may affect the polarity of the residue. In some embodiments, an amino acid substitution at residue Y354F relative to SEQ ID NO: 14 may change the residue from polar to nonpolar, which may alter the hydrophobicity of the binding pocket.

[0343] In some embodiments, a THCAS comprises an amino acid substitution, addition, deletion or insertion at a residue corresponding to position 61, 164, 301, 325, and/or 495 in SEQ ID NO: 20.

[0344] In some embodiments, the THCAS comprises the amino acid Q at a residue corresponding to position 61 in SEQ ID NO: 20; the amino acid Q at a residue corresponding to position 164 in SEQ ID NO: 20; the amino acid Q at a residue corresponding to position 301 in SEQ ID NO: 20; the amino acid Q at a residue corresponding to position 325 in SEQ ID NO: 20; and/or the amino acid Q at a residue corresponding to position 495 in SEQ ID NO: 20.

### Cannabidiolic Acid Synthase (CBDAS)

[0345] A host cell described in this application may comprise a TS that is a cannabidiolic acid synthase (CBDAS). As used in this application, a “CBDAS” refers to an enzyme that is capable of catalyzing oxidative cyclization of a prenyl moiety (e.g., terpene) of a compound of Formula (8) to produce a compound of Formula 9. In some embodiments, a compound of Formula 9 is a compound of Formula (9a) (cannabidiolic acid (CBDA)), CBDVA, or CBDP. A CBDAS may use cannabigerolic acid (CBGA) or cannabinerolic acid as a substrate. In some embodiments, a cannabidiolic acid synthase is capable of oxidative cyclization of cannabigerolic acid (CBGA) to produce cannabidiolic acid (CBDA). In some embodiments, the CBDAS may catalyze the oxidative cyclization of other substrates, such as 3-geranyl-2,4-dihydro-6-alkylbenzoic acids like cannabigerovarinic acid (CBGVA). In some embodiments, the CBDAS exhibits specificity for CBGA substrates.

[0346] In some embodiments, a Cannabis CBDAS is encoded by the CBDAS gene and is a flavoenzyme. A non-limiting example of a Cannabis CBDAS is provided by UniProtKB-A6P6V9 (SEQ ID NO: 13) from C. sativa:

MKCSTFSFWFVCKIIFFFFSFNIQTSIANPRENFLKCFS
QYIPNNATNLKLVYTQNNPLYMSVLNSTIHNLRFTSDTTPKPLVIVTPSH
VSHIQGTILCSKKVGLQIRTRSGGHDSEGMSYISQVPFVIVDLRNMRSIK
IDVHSQTAWVEAGATLGEVYYWVNEKNENLSLAAGYCPTVCAGGHFGGGG
YGPLMRNYGLAADNIIDAHLVNVHGKVLDRKSMGEDLFWALRGGGAESFG
IIVAWKIRLVAVPKSTMFSVKKIMEIHELVKLVNKWQNIAYKYDKDLLLM
THFITRNITDNQGKNKTAIHTYFSSVFLGGVDSLVDLMNKSFPELGIKKT
DCRQLSWIDTIIFYSGVVNYDTDNFNKEILLDRSAGQNGAFKIKLDYVKK
PIPESVFVQILEKLYEEDIGAGMYALYPYGGIMDEISESAIPFPHRAGIL
YELWYICSWEKQEDNEKHLNWIRNIYNFMTPYVSKNPRLAYLNYRDLDIG
INDPKNPNNYTQARIWGEKYFGKNFDRLVKVKTLVDPNNFFRNEQSIPPL
PRHRH

[0347] In some embodiments, a Cannabis CBDAS comprises the following sequence:

(SEQ ID NO: 136)
NPRENFLKCFSQYIPNNATNLKLVYTQNNPLYMSVLNSTIHNLRFTSDTT
PKPLVIVTPSHVSHIQGTILCSKKVGLQIRTRSGGHDSEGMSYISQVPFV
IVDLRNMRSIKIDVHSQTAWVEAGATLGEVYYWVNEKNENLSLAAGYCPT
VCAGGHFGGGGYGPLMRNYGLAADNIIDAHLVNVHGKVLDRKSMGEDLFW
ALRGGGAESFGIIVAWKIRLVAVPKSTMFSVKKIMEIHELVKLVNKWQNI
AYKYDKDLLLMTHFITRNITDNQGKNKTAIHTYFSSVFLGGVDSLVDLMN
KSFPELGIKKTDCRQLSWIDTIIFYSGVVNYDTDNFNKEILLDRSAGQNG
AFKIKLDYVKKPIPESVFVQILEKLYEEDIGAGMYALYPYGGIMDEISES
AIPFPHRAGILYELWYICSWEKQEDNEKHLNWIRNIYNFMTPYVSKNPRL
AYLNYRDLDIGINDPKNPNNYTQARIWGEKYFGKNFDRLVKVKTLVDPNN
FFRNEQSIPPLPRHRH

[0348] As described in the Examples section, novel CBDAS enzymes were identified in this disclosure that are capable of catalyzing the conversion of a compound of Formula (8) to produce a compound of Formula (9) and that can be functionally expressed in host cells. Without being bound by a particular theory, the novel CBDAS enzymes disclosed in this application may be useful for engineering to alter the activity and/or abundance of the CBDAS (e.g., change the product profile, substrate profile, and/or kinetics (e.g., Kcat/Vmax and/or Kd) of the TS).

[0349] In some embodiments, a CBDAS comprises the amino acid sequence of any one of SEQ ID NOs: 36, 143, 149, 151-153, 156, 160, 163, 165, 166, 168, 170-172, 175-180, 182-197, 201, 204, 205, 207-225, 464-473, 478-480, 484-485, 487-489, 492-498, 500, 503, 506-548, 550, 551-552, 556, 558, 565, 567, 569-570, 572-578, 582, 584, 586, 588, 591, 593-595, 597, 600, 602, 604, 605, 718, 755, 784, 786, 790-792, 794, 795, 798, 800, 801, 803, 804, 806-810, 812-821, 823, 825, 827-836, 838, 839, 841-868, 870-874, 875-879, 881, 883, 913-932, 939-941, 944, 945, 946, and/or 948.

[0350] In some embodiments, a CBDAS comprises the nucleotide sequence of any one of SEQ ID NOs: 27, 52, 58, 60-62, 65, 69, 72, 74, 75, 77, 79-81, 84-89, 91-106, 110-111, 113-114, 116-134, 322-331, 336-338, 342-343, 345-347, 350-356, 358, 361, 364-406, 408-410, 414, 416, 423, 425, 427-428, 430-436, 440, 442, 444, 446, 449, 451453, 455, 458, 460, 462, 463, 974, 1011, 1040, 1042, 1046-1048, 1050, 1051, 1054, 1056, 1057, 1059, 1060, 1062-1066, 1068-1077, 1079, 1081, 1083-1092, 1094, 1095, 1097-1124, 1126-1135, 1137, 1139, 1169-1188, 1195-1197, 1199-1201, 1202, and/or 1204.

[0351] In some embodiments, a CBDAS comprises a nucleic acid or protein sequence that is at least 5%, at least 10%, at least 15%, at least 20%, at least 25%, at least 30%, at least 35%, at least 40%, at least 45%, at least 50%, at least 55%, at least 60%, at least 65%, at least 70%, at least 71%, at least 72%, at least 73%, at least 74%, at least 75%, at least 76%, at least 77%, at least 78%, at least 79%, at least 80%, at least 81%, at least 82%, at least 83%, at least 84%, at least 85%, at least 86%, at least 87%, at least 88%, at least 89%, at least 90%, at least 91%, at least 92%, at least 93%, at least 94%, at least 95%, at least 96%, at least 97%, at least 98%, at least 99%, or is 100% identical, including all values in between, to one or more of SEQ ID NOs: 13, 27, 36, 52, 58, 60-62, 65, 69, 72, 74, 75, 77, 79-81, 84-89, 91-106, 110-111, 113-114, 116-134, 143, 149, 151-153, 156, 160, 163, 165, 166, 168, 170-172, 175-180, 182-197, 201, 204, 205, 207-225, 322-331, 336-338, 342-343, 345-347, 350-356, 358, 361, 364-406, 408410, 414, 416, 423, 425, 427428, 430436, 440, 442, 444, 446, 449, 451453, 455, 458, 460, 462, 463, 464-473, 478-480, 484485, 487-489, 492-498, 500, 503, 506-548, 550, 551-552, 556, 558, 565, 567, 569-570, 572-578, 582, 584, 586, 588, 591, 593-595, 597, 600, 602, 604, 605, 718, 755, 784, 786, 790-792, 794, 795, 798, 800, 801, 803, 804, 806-810, 812-821, 823, 825, 827-836, 838, 839, 841-868, 870-874, 875-879, 881, 883, 913-932, 939-941, 944, 945, 946, 948, 974, 1011, 1040, 1042, 1046-1048, 1050, 1051, 1054, 1056, 1057, 1059, 1060, 1062-1066, 1068-1077, 1079, 1081, 1083-1092, 1094, 1095, 1097-1124, 1126-1135, 1137, 1139, 1169-1188, 1195-1197, 1199-1201, 1202, and/or 1204 or to any TS disclosed in this application. In some embodiments, a CBDAS comprises a sequence that is at most 5%, at most 10%, at most 15%, at most 20%, at most 25%, at most 30%, at most 35%, at most 40%, at most 45%, at most 50%, at most 55%, at most 60%, at most 65%, at most 70%, at most 71%, at most 72%, at most 73%, at most 74%, at most 75%, at most 76%, at most 77%, at most 78%, at most 79%, at most 80%, at most 81%, at most 82%, at most 83%, at most 84%, at most 85%, at most 86%, at most 87%, at most 88%, at most 89%, at most 90%, at most 91%, at most 92%, at most 93%, at most 94%, at most 95%, at most 96%, at most 97%, at most 98%, at most 99%, or is 100% identical, including all values in between, to one or more of SEQ ID NOs: 13, 27, 36, 52, 58, 60-62, 65, 69, 72, 74, 75, 77, 79-81, 84-89, 91-106, 110-111, 113-114, 116-134, 143, 149, 151-153, 156, 160, 163, 165, 166, 168, 170-172, 175-180, 182-197, 201, 204, 205, 207-225, 322-331, 336-338, 342-343, 345-347, 350-356, 358, 361, 364-406, 408-410, 414, 416, 423, 425, 427-428, 430-436, 440, 442, 444, 446, 449, 451-453, 455, 458, 460, 462, 463, 464-473, 478-480, 484-485, 487-489, 492-498, 500, 503, 506-548, 550, 551-552, 556, 558, 565, 567, 569-570, 572-578, 582, 584, 586, 588, 591, 593-595, 597, 600, 602, 604, 605, 718, 755, 784, 786, 790-792, 794, 795, 798, 800, 801, 803, 804, 806-810, 812-821, 823, 825, 827-836, 838, 839, 841-868, 870-874, 875-879, 881, 883, 913-932, 939-941, 944, 945, 946, 948, 974, 1011, 1040, 1042, 1046-1048, 1050, 1051, 1054, 1056, 1057, 1059, 1060, 1062-1066, 1068-1077, 1079, 1081, 1083-1092, 1094, 1095, 1097-1124, 1126-1135, 1137, 1139, 1169-1188, 1195-1197, 1199-1201, 1202, and/or 1204 or to any TS disclosed in this application. In some embodiments, a CBDAS comprises a sequence that is 5%, 10%, 15%, 20%, 25%, 30%, 35%, 40%, 45%, 50%, 55%, 60%, 65%, 70%, 71%, 72%, 73%, 74%, 75%, 76%, 77%, 78%, 79%, 80%, 81%, 82%, 83%, 84%, 85%, 86%, 87%, 88%, 89%, 90%, 91%, 92%, 93%, 94%, 95%, 96%, 97%, 98%, 99%, or 100% identical, including all values in between, to one or more of SEQ ID NOs: 13, 27, 36, 52, 58, 60-62, 65, 69, 72, 74, 75, 77, 79-81, 84-89, 91-106, 110-111, 113-114, 116-134, 143, 149, 151-153, 156, 160, 163, 165, 166, 168, 170-172, 175-180, 182-197, 201, 204, 205, 207-225, 322-331, 336-338, 342-343, 345-347, 350-356, 358, 361, 364-406, 408-410, 414, 416, 423, 425, 427-428, 430-436, 440, 442, 444, 446, 449, 451-453, 455, 458, 460, 462, 463, 464-473, 478-480, 484-485, 487-489, 492-498, 500, 503, 506-548, 550, 551-552, 556, 558, 565, 567, 569-570, 572-578, 582, 584, 586, 588, 591, 593-595, 597, 600, 602, 604, 605, 718, 755, 784, 786, 790-792, 794, 795, 798, 800, 801, 803, 804, 806-810, 812-821, 823, 825, 827-836, 838, 839, 841-868, 870-874, 875-879, 881, 883, 913-932, 939-941, 944, 945, 946, 948, 974, 1011, 1040, 1042, 1046-1048, 1050, 1051, 1054, 1056, 1057, 1059, 1060, 1062-1066, 1068-1077, 1079, 1081, 1083-1092, 1094, 1095, 1097-1124,1126-1135, 1137, 1139, 1169-1188,1195-1197, 1199-1201, 1202, and/or 1204 or to any TS disclosed in this application.

[0352] In some embodiments, a CBDAS comprises a sequence that is at least 5%, 10%, 15%, 20%, 25%, 30%, 35%, 40%, 45%, 50%, 55%, 60%, 65%, 70%, 71%, 72%, 73%, 74%, 75%, 76%, 77%, 78%, 79%, 80%, 81%, 82%, 83%, 84%, 85%, 86%, 87%, 88%, 89%, 90%, 91%, 92%, 93%, 94%, 95%, 96%, 97%, 98%, 99%, or 100% identical to one or more SEQ ID NOs: 13, 27, 36, 52, 58, 60-62, 65, 69, 72, 74, 75, 77, 79-81, 84-89, 91-106, 110-111, 113-114, 116-134, 143, 149, 151-153, 156, 160, 163, 165, 166, 168, 170-172, 175-180, 182-197, 201, 204, 205, 207-225, 322-331, 336-338, 342-343, 345-347, 350-356, 358, 361, 364-406, 408-410, 414, 416, 423, 425, 427-428, 430-436, 440, 442, 444, 446, 449, 451-453, 455, 458, 460, 462, 463, 464-473, 478-480, 484-485, 487-489, 492-498, 500, 503, 506-548, 550, 551-552, 556, 558, 565, 567, 569-570, 572-578, 582, 584, 586, 588, 591, 593-595, 597, 600, 602, 604, 605, 718, 755, 784, 786, 790-792, 794, 795, 798, 800, 801, 803, 804, 806-810, 812-821, 823, 825, 827-836, 838, 839, 841-868, 870-874, 875-879, 881, 883, 913-932, 939-941,944,945, 946, 948, 974, 1011, 1040, 1042, 1046-1048, 1050, 1051, 1054, 1056, 1057, 1059, 1060, 1062-1066, 1068-1077, 1079, 1081, 1083-1092, 1094, 1095, 1097-1124, 1126-1135, 1137, 1139, 1169-1188, 1195-1197, 1199-1201, 1202, and/or 1204 wherein the sequence is linked to one or more signal peptides. In some embodiments, a signal peptide that comprises SEQ ID NO: 16 or a sequence that has no more than two amino acid substitutions, insertions, additions, or deletions relative to the sequence of SEQ ID NO: 16 is linked to the N-terminus of the sequence that is at least 5%, 10%, 15%, 20%, 25%, 30%, 35%, 40%, 45%, 50%, 55%, 60%, 65%, 70%, 71%, 72%, 73%, 74%, 75%, 76%, 77%, 78%, 79%, 80%, 81%, 82%, 83%, 84%, 85%, 86%, 87%, 88%, 89%, 90%, 91%, 92%, 93%, 94%, 95%, 96%, 97%, 98%, 99%, or 100% identical to one or more of SEQ ID NOs: 13, 27, 36, 52, 58, 60-62, 65, 69, 72, 74, 75, 77, 79-81, 84-89, 91-106, 110-111, 113-114, 116-134, 143, 149, 151-153, 156, 160, 163, 165, 166, 168, 170-172, 175-180, 182-197, 201, 204, 205, 207-225, 322-331, 336-338, 342-343, 345-347, 350-356, 358, 361, 364-406, 408-410, 414, 416, 423, 425, 427-428, 430-436, 440, 442, 444, 446, 449, 451-453, 455, 458, 460, 462, 463, 464-473, 478-480, 484-485, 487-489, 492-498, 500, 503, 506-548, 550, 551-552, 556, 558, 565, 567, 569-570, 572-578, 582, 584, 586, 588, 591, 593-595, 597, 600, 602, 604, 605, 718, 755, 784, 786, 790-792, 794, 795, 798, 800, 801, 803, 804, 806-810, 812-821, 823, 825, 827-836, 838, 839, 841-868, 870-874, 875-879, 881, 883, 913-932, 939-941, 944, 945, 946, 948, 974, 1011, 1040, 1042, 1046-1048, 1050, 1051, 1054, 1056, 1057, 1059, 1060, 1062-1066, 1068-1077, 1079, 1081, 1083-1092, 1094, 1095, 1097-1124, 1126-1135, 1137, 1139, 1169-1188, 1195-1197, 1199-1201, 1202, and/or 1204. In some embodiments, a methionine residue is added to the N-terminus of SEQ ID NO: 16. In some embodiments, a signal peptide that comprises SEQ ID NO: 17 or a sequence that has no more than one amino acid substitution, insertion, addition, or deletion relative to the sequence of SEQ ID NO: 17 is linked to the carboxyl terminus of the sequence that is at least 5%, 10%, 15%, 20%, 25%, 30%, 35%, 40%, 45%, 50%, 55%, 60%, 65%, 70%, 71%, 72%, 73%, 74%, 75%, 76%, 77%, 78%, 79%, 80%, 81%, 82%, 83%, 84%, 85%, 86%, 87%, 88%, 89%, 90%, 91%, 92%, 93%, 94%, 95%, 96%, 97%, 98%, 99%, or 100% identical to one or more of SEQ ID NOs: 13, 27, 36, 52, 58, 60-62, 65, 69, 72,74,75,77,79-81, 84-89,91-106, 110-111, 113-114, 116-134, 143, 149, 151-153, 156, 160, 163, 165, 166, 168, 170-172, 175-180, 182-197, 201, 204, 205, 207-225, 322-331, 336-338, 342-343, 345-347, 350-356, 358, 361, 364-406, 408-410, 414, 416, 423, 425, 427-428, 430-436, 440, 442, 444, 446, 449, 451-453, 455, 458, 460, 462, 463, 464-473, 478-480, 484-485, 487-489, 492-498, 500, 503, 506-548, 550, 551-552, 556, 558, 565, 567, 569-570, 572-578, 582, 584, 586, 588, 591, 593-595, 597, 600, 602, 604, 605, 718, 755, 784, 786, 790-792, 794, 795, 798, 800, 801, 803, 804, 806-810, 812-821, 823, 825, 827-836, 838, 839, 841-868, 870-874, 875-879, 881, 883, 913-932, 939-941, 944, 945, 946, 948, 974, 1011, 1040, 1042, 1046-1048, 1050, 1051, 1054, 1056, 1057, 1059, 1060, 1062-1066, 1068-1077, 1079, 1081, 1083-1092, 1094, 1095, 1097-1124, 1126-1135, 1137, 1139, 1169-1188, 1195-1197, 1199-1201, 1202, and 1204.

[0353] Additional non-limiting examples of CBDAS enzymes may also be found in U.S. Pat. No. 9,512,391 and U.S. Publication No. 2018/0179564, which are incorporated by reference in this application in their entireties.

[0354] In some embodiments, a CBDAS comprises an amino acid deletion or substitution at a position shown in Table 17, Table 18, or Table 19.

[0355] In some embodiments, a CBDAS comprises an amino acid substitution, addition, deletion or insertion at a residue corresponding to position 31, 47, 49, 50, 56, 57, 58, 69, 79, 89, 90, 95, 100, 103, 106, 116, 124, 143, 150, 162, 166, 167, 168, 171, 172, 175, 180, 184, 196, 211, 213, 216, 230, 250, 253, 263, 273, 283, 287, 290, 292, 319, 322, 339, 343, 344, 352, 353, 376, 377, 378, 380, 386, 394, 397, 407, 409, 410,411, 414, 415, 416, 418,442, 441, 445, 446, 450, 452, 454, 467, 479, 481, 486, 490, 492, 504, 512 527 and/or 542 in SEQ ID NO: 13.

[0356] In some embodiments, the CBDAS comprises the amino acid Q at a residue corresponding to position 31 in SEQ ID NO: 13; the amino acid A at a residue corresponding to position 47 in SEQ ID NO: 13; the amino acid P at a residue corresponding to position 49 in SEQ ID NO: 13; the amino acid N at a residue corresponding to position 50 in SEQ ID NO: 13; the amino acid H at a residue corresponding to position 56 in SEQ ID NO: 13; the amino acid D at a residue corresponding to position 57 in SEQ ID NO: 13; the amino acid Q at a residue corresponding to position 58 in SEQ ID NO: 13; the amino acid R or Q at a residue corresponding to position 69 in SEQ ID NO: 13; the amino acid G at a residue corresponding to position 79 in SEQ ID NO: 13; the amino acid N, D, E, Q, or R at a residue corresponding to position 89 in SEQ ID NO: 13; the amino acid C at a residue corresponding to position 90 in SEQ ID NO: 13; the amino acid A at a residue corresponding to position 95 in SEQ ID NO: 13; the amino acid A at a residue corresponding to position 100 in SEQ ID NO: 13; the amino acid H at a residue corresponding to position 103 in SEQ ID NO: 13; the amino acid E at a residue corresponding to position 106 in SEQ ID NO: 13; the amino acid A or G at a residue corresponding to position 116 in SEQ ID NO: 13, the amino acid N or M at a residue corresponding to position 124 in SEQ ID NO: 13; the amino acid E at a residue corresponding to position 143 in SEQ ID NO: 13; the amino acid Q at a residue corresponding to position 150 in SEQ ID NO: 13; the amino acid S at a residue corresponding to position 166 in SEQ ID NO: 13; the amino acid K at a residue corresponding to position 167 in SEQ ID NO: 13; the amino acid T at a residue corresponding to position 168 in SEQ ID NO: 13; the amino acid F at a residue corresponding to position 171 in SEQ ID NO: 13; the amino acid P at a residue corresponding to position 172 in SEQ ID NO: 13; the amino acid F at a residue corresponding to position 175 in SEQ ID NO: 13; the amino acid G at a residue corresponding to position 180 in SEQ ID NO: 13; the amino acid F at a residue corresponding to position 184 in SEQ ID NO: 13; the amino acid K at a residue corresponding to position 196 in SEQ ID NO: 13; the amino acid D at a residue corresponding to position 211 in SEQ ID NO: 13; the amino acid N at a residue corresponding to position 213 in SEQ ID NO: 13; the amino acid L at a residue corresponding to position 216 in SEQ ID NO: 13; the amino acid I at a residue corresponding to position 230 in SEQ ID NO: 13; the amino acid R at a residue corresponding to position 250 in SEQ ID NO: 13; an insertion of an amino acid S at a residue corresponding to position 253 in SEQ ID NO: 13; the amino acid L at a residue corresponding to position 263 in SEQ ID NO: 13; the amino acid H at a residue corresponding to position 273 in SEQ ID NO: 13; the amino acid P at a residue corresponding to position 283 in SEQ ID NO: 13; the amino acid T at a residue corresponding to position 287 in SEQ ID NO: 13; the amino acid M or A at a residue corresponding to position 290 in SEQ ID NO: 13; the amino acid M at a residue corresponding to position 292 in SEQ ID NO: 13; the amino acid D or N at a residue corresponding to position 319 in SEQ ID NO: 13, the amino acid E at a residue corresponding to position 322 in SEQ ID NO: 13; the amino acid E at a residue corresponding to position 339 in SEQ ID NO: 13; the amino acid E at a residue corresponding to position 343 in SEQ ID NO: 13; the amino acid M at a residue corresponding to position 344 in SEQ ID NO: 13; the amino acid M at a residue corresponding to position 353 in SEQ ID NO: 13; the amino acid L or Y at a residue corresponding to position in SEQ ID NO: 13; the amino acid L, Y, A, G, N, P, R, S, T, or V at a residue corresponding to position 376 in SEQ ID NO: 13; the amino acid F, P, or R at a residue corresponding to position 377 in SEQ ID NO: 13, the amino acid K, R, S, or T at a residue corresponding to position 378 in SEQ ID NO: 13; the amino acid Y at a residue corresponding to position 380 in SEQ ID NO: 13; the amino acid F at a residue corresponding to position 386 in SEQ ID NO: 13; the amino acid E at a residue corresponding to position 394 in SEQ ID NO: 13; the amino acid E or K at a residue corresponding to position 397 in SEQ ID NO: 13; the amino acid E at a residue corresponding to position 407 in SEQ ID NO: 13; the amino acid G at a residue corresponding to position 409 in SEQ ID NO: 13; the amino acid T or V at a residue corresponding to position 410 in SEQ ID NO: 13; the amino acid G at a residue corresponding to position 411 in SEQ ID NO: 13; the amino acid I, L, M, T, or V at a residue corresponding to position 414 in SEQ ID NO: 13; the amino acid M at a residue corresponding to position 415 in SEQ ID NO: 13; the amino acid F, I, or M at a residue corresponding to position 416 in SEQ ID NO: 13; the amino acid F at a residue corresponding to position 418 in SEQ ID NO: 13; the amino acid S or T at a residue corresponding to position 441 in SEQ ID NO: 13, the amino acid I at a residue corresponding to position 442 in SEQ ID NO: 13; the amino acid V at a residue corresponding to position 445 in SEQ ID NO: 13; the amino acid T or V at a residue corresponding to position 446 in SEQ ID NO: 13; the amino acid S at a residue corresponding to position 450 in SEQ ID NO: 13; the amino acid T at a residue corresponding to position 452 in SEQ ID NO: 13; the amino acid A at a residue corresponding to position 454 in SEQ ID NO: 13; the amino acid Y at a residue corresponding to position 467 in SEQ ID NO: 13; the amino acid S or T at a residue corresponding to position 479 in SEQ ID NO: 13; the amino acid I, M, V, or Y at a residue corresponding to position 481 in SEQ ID NO: 13; the amino acid V at a residue corresponding to position 486 in SEQ ID NO: 13; the amino acid T at a residue corresponding to position 490 in SEQ ID NO: 13, the amino acid N at a residue corresponding to position 492 in SEQ ID NO: 13; the amino acid Q at a residue corresponding to position 504 in SEQ ID NO: 13; the amino acid N at a residue corresponding to position 512 in SEQ ID NO: 13; the amino acid D at a residue corresponding to position 527 in SEQ ID NO: 13; and/or the amino acid M at a residue corresponding to position 542 in SEQ ID NO: 13.

[0357] In some embodiments, a CBDAS comprises an amino acid deletion or substitution at a residue corresponding to position 50, 116 or 414 in SEQ ID NO: 13. In some embodiments, the amino acid deletion or substitution comprises K50N, S116A and/or A414V.

[0358] In some embodiments, the CBDAS comprises any combination of amino acid substitutions relative to SEQ ID NO: 13 shown in Table 17, Table 18, or Table 19.

[0359] In some embodiments, a CBDAS comprises relative to SEQ ID NO: 13: S100A, S116A, and H213N, H69Q, G95A, S116A, T339E, and Q343E; H69Q, G95A, S116A, and T339E; T47A, L49P, N56H, N57D, P58Q, H69Q, H89N, and G95A; G95A, S116A, and Q343E; G95A, S116A, and T339E; K50N, H69Q, G95A, H213N, T339E, and L344M; H69Q, G95A, S116A, H213N, T339E, and Q343E; K50N, H69Q, G95A, and Q343E; K50N, H69Q, G95A, H213N, Q343E, and L344M; G95A, S116A, H213N, T339E, Q343E, and L344M; G95A, S116A, T339E, and Q343E; G95A, S116A, H213N, Q343E, and L344M; G95A, S116A, H213N, T339E, and Q343E; R31Q, T47A, L49P, N56H, N57D, P58Q, H69Q, H89N, and G95A; K50N, G95A, S116A, H213N, L344M, and N527D; G95A, S116A, T339E, Q343E, and L344M; K50N, H69Q, H213N, T339E, Q343E, and A414V; G95A, A414V, and N527D; H69Q, G95A, H213N, S322E, Q343E, L344M, and A414V; G95A, Q343E, G378T, and A414V; K50N, H69Q, G95A, T339E, Q343E, L344M, and A414V; H69Q, G95A, H213N, L344M, and A414V; K50N, H69Q, G95A, Q343E, and A414V; H69Q, G95A, H213N, T339E, Q343E, L344M, and A414V; G95A, H213N, Q343E, and A414V; G95A, H213N, T339E, Q343E, A414V, and D492N; H69Q, G95A, H213N, Q343E, A414V, and N527D; G95A, H213N, T339E, G378T, A410V, A414V, and 1445V; H69Q, G95A, Q343E, A414V, and N527D; K50N, H69Q, G95A, H213N, Q343E, L344M, and A414V; K50N, G95A, and A414V; K50N, H69Q, G95A, H213N, T339E, Q343E, and A414V; G95A, T339E, L344M, and A414V; K50N, H213N, Q343E, L344M, and A414V; G95A, H213N, T339E, Q343E, and A414V; K50N, G95A, H213N, T339E, Q343E, A414V, and D492N; K50N, G95A, H213N, T339E, Q343E, L344M, and A414V; G95A, T339E, Q343E, L344M, and A414V; G95A, Q343E, L344M, and A414V; G95A, H213N, Q343E, L344M, and A414V; G95A, T339E, Q343E, and A414V; G95A, H213N, T339E, L344M, and A414V; K50N, G95A, H213N, Q343E, L344M, and A414V; K50N, G95A, Q343E, L344M, and A414V; or G95A, H213N, T339E, Q343E, L344M, and A414V.

[0360] In some embodiments, a CBDAS comprises relative to SEQ ID NO: 13: S100A, S116A, and H213N; H69Q, G95A, S116A, T339E, and Q343E; H69Q, G95A, S116A, and T339E; T47A, L49P, N56H, N57D, P58Q, H69Q, H89N, and G95A; G95A, Si 16A, and Q343E; G95A, S116A, and T339E; K50N, H69Q, G95A, H213N, T339E, and L344M; H69Q, G95A, S116A, H213N, T339E, and Q343E; K50N, H69Q, G95A, and Q343E; K50N, H69Q, G95A, H213N, Q343E, and L344M; G95A, S116A, H213N, T339E, Q343E, and L344M; G95A, S116A, T339E, and Q343E; G95A, S116A, H213N, Q343E, and L344M; G95A, S116A, H213N, T339E, and Q343E; R31Q, T47A, L49P, N56H, N57D, P58Q, H69Q, H89N, and G95A; K50N, G95A, S116A, H213N, L344M, and N527D; G95A, S116A, T339E, Q343E, and L344M; K50N, H69Q, H213N, T339E, Q343E, and A414V; G95A, A414V, and N527D; H69Q, G95A, H213N, S322E, Q343E, L344M, and A414V; G95A, Q343E, G378T, and A414V; K50N, H69Q, G95A, T339E, Q343E, L344M, and A414V; H69Q, G95A, H213N, L344M, and A414V; K50N, H69Q, G95A, Q343E, and A414V; H69Q, G95A, H213N, T339E, Q343E, L344M, and A414V; G95A, H213N, Q343E, and A414V; G95A, H213N, T339E, Q343E, A414V, and D492N; H69Q, G95A, H213N, Q343E, A414V, and N527D; G95A, H213N, T339E, G378T, A410V, A414V, and 1445V; H69Q, G95A, Q343E, A414V, and N527D; K50N, H69Q, G95A, H213N, Q343E, L344M, and A414V; K50N, G95A, and A414V SEQ ID NO: 13, K50N, H69Q, G95A, H213N, T339E, Q343E, and A414V; G95A, T339E, L344M, and A414V; K50N, H213N, Q343E, L344M, and A414V; G95A, H213N, T339E, Q343E, and A414V; K50N, G95A, H213N, T339E, Q343E, A414V, and D492N; K50N, G95A, H213N, T339E, Q343E, L344M, and A414V; G95A, T339E, Q343E, L344M, and A414V; G95A, Q343E, L344M, and A414V; G95A, H213N, Q343E, L344M, and A414V; G95A, T339E, Q343E, and A414V; G95A, H213N, T339E, L344M, and A414V; K50N, G95A, H213N, Q343E, L344M, and A414V; K50N, G95A, Q343E, L344M, and A414V; or G95A, H213N, T339E, Q343E, L344M, and A414V.

[0361] In some embodiments, a CBDAS comprises relative to SEQ ID NO. 13: K50N, G95A, N196K, H213N, T339E, Q343E, L344M, and A414V; G95A, Y175F, T339E, Q343E, and A414V; G95A, Si 16A, T339E, Q343E, A414V, and N527D3; G95A, E150Q, V1621, C180G, N196K, N211D, N273H, T339E, Q343E, and A414V; G95A, T339E, Q343E, Q376V, and A414V; K50N, G95A, S100A, E150Q, V1621, C180G, N196K, N211D, H213N, S322E, T339E, Q343E, L344K. A414V, E452T, and I504Q; G95A, N196K, T339E, Q343E, and A414V, K50N, G95A, V103H, H213N, T339E, Q343E, L344M, and A414V, G95A, T339E, Q343E, Q376R, and A414V; or K50N, H213N, L230L, T339E, Q343E, and L344M.

[0362] In some embodiments, a CBDAS comprises an amino acid insertion at a residue corresponding to position 253 in SEQ ID NO: 13. In some embodiments, the amino acid S is inserted at a residue corresponding to position 253 in SEQ ID NO: 13.

TABLE 4
Mutations in C. sativa CBDAS that demonstrated
increased CBDA titer either alone or in combination

Residue in SEQ ID

NO: 13 (UniProt

| A6P6V9) | Amino Acid Substitutions | | | | | | | | | |
|---|---|---|---|---|---|---|---|---|---|---|
| R31 | Q | | | | | | | | | |
| T47 | A | | | | | | | | | |
| L49 | P | | | | | | | | | |
| K50 | N | | | | | | | | | |
| N56 | H | | | | | | | | | |
| N57 | D | | | | | | | | | |
| P58 | Q | | | | | | | | | |
| H69 | Q | R | | | | | | | | |
| P79 | G | | | | | | | | | |
| H89 | N | D | E | Q | R | | | | | |
| V90 | C | | | | | | | | | |
| G95 | A | | | | | | | | | |
| S100 | A | | | | | | | | | |
| V103 | H | | | | | | | | | |
| Q106 | E | | | | | | | | | |
| S116 | A | G | | | | | | | | |
| Q124 | N | M | | | | | | | | |
| H143 | E | | | | | | | | | |
| E150 | Q | | | | | | | | | |
| V162 | I | | | | | | | | | |
| N166 | S | | | | | | | | | |
| E167 | K | | | | | | | | | |
| N168 | T | | | | | | | | | |
| L171 | F | | | | | | | | | |
| A172 | P | | | | | | | | | |
| Y175 | F | | | | | | | | | |
| C180 | G | | | | | | | | | |
| H184 | F | | | | | | | | | |
| N196 | K | | | | | | | | | |
| N211 | D | | | | | | | | | |
| H213 | N | | | | | | | | | |
| V216 | L | | | | | | | | | |
| L230 | I | | | | | | | | | |
| A250 | R | | | | | | | | | |
| M263 | L | | | | | | | | | |
| N273 | H | | | | | | | | | |
| D283 | P | | | | | | | | | |
| L287 | T | | | | | | | | | |
| T290 | A | M | | | | | | | | |
| F292 | M | | | | | | | | | |
| G319 | D | N | | | | | | | | |
| S322 | E | | | | | | | | | |
| T339 | E | | | | | | | | | |
| Q343 | E | | | | | | | | | |
| L344 | M | | | | | | | | | |
| Y353 | M | | | | | | | | | |
| Q376 | L | Y | A | G | N | P | R | S | T | V |
| N377 | F | P | R | | | | | | | |
| G378 | T | K | R | S | | | | | | |
| F380 | Y | | | | | | | | | |
| Y386 | F | | | | | | | | | |
| S394 | E | | | | | | | | | |
| V397 | E | K | | | | | | | | |
| D407 | E | | | | | | | | | |
| A410 | V | T | | | | | | | | |
| A414 | V | I | L | M | T | | | | | |
| L415 | M | | | | | | | | | |
| Y416 | F | I | M | | | | | | | |
| Y418 | F | | | | | | | | | |
| E441 | S | T | | | | | | | | |
| L442 | I | | | | | | | | | |
| I445 | V | A | | | | | | | | |
| C446 | T | V | | | | | | | | |
| A479 | S | T | | | | | | | | |
| K450 | S | | | | | | | | | |
| E452 | T | | | | | | | | | |
| N454 | A | | | | | | | | | |
| F467 | Y | | | | | | | | | |
| L481 | I | M | V | Y | | | | | | |
| L486 | V | | | | | | | | | |
| I490 | T | | | | | | | | | |
| D492 | N | | | | | | | | | |
| I504 | Q | | | | | | | | | |
| K512 | N | | | | | | | | | |
| N527 | D | | | | | | | | | |
| H542 | M | | | | | | | | | |

[0363] In some embodiments, one or more amino acid substitutions at particular residues relative to SEQ ID NO: 13 may change the polarity of the residue and alter the stability and/or functionality of a CBDAS. Without wishing to be bound by theory, mutations that map to the surface of the tertiary structure of CBDAS may, alone or in combination, help solubilize or stabilize the enzyme and result in increased CBDA and/or CBDVA titer. In some embodiments, one or more of the following amino acid substitutions relative to SEQ ID NO: 13 may change the polarity of the residue and may impact solubilization and/or stabilization of the enzyme: K50N, H213N, S322E, T339E, L344M, and N527D. In some embodiments, one or more of the following amino acid substitutions relative to SEQ ID NO: 13 may change the polarity of the residue and may impact solubilization and/or stabilization of the enzyme: N211D, H213N, and E452T. In some embodiments, an amino acid substitution at residue N211 relative to SEQ ID NO: 13 affects the polarity of the residue. For example, the amino acid substitution N211 D relative to SEQ ID NO: 13 switches the residue from a non-charged polar residue to a negatively charged residue, which may favorably counteract the charge of the neighboring positive residues on the surface of the protein (R108, H213 and K215). In some embodiments, an amino acid substitution at residue H213 relative to SEQ ID NO: 13 affects the polarity of the residue. For example, the amino acid substitution H213N relative to SEQ ID NO: 13 switches the residue from a positively charged residue to a non-charged polar residue, which may favorably minimize the size of a positively charged surface region on the protein consisting of the neighboring positive residues (K101, K102, and K215). In some embodiments, an amino acid substitution at residue E452 relative to SEQ ID NO: 13 affects the polarity of the residue. For example, the amino acid substitution E452T relative to SEQ ID NO: 13 switches the residue from a negatively charged residue to a non-charged polar residue, which may favorably minimize a negatively charged surface region on the protein consisting of the neighboring negative residues (E449 and D453).

[0364] In some embodiments, one or more amino acid substitutions at particular residues relative to SEQ ID NO: 13 may change the polarity of the residue and alter the protein folding and/or protein packing of a CBDAS. Without wishing to be bound by theory, mutations that map to the interior of the enzyme may, alone or in combination, impact protein folding and/or protein packing and result in increased CBDA and/or CBDVA titer. In some embodiments, one or more of the following amino acid substitutions relative to SEQ ID NO: 13 may impact folding or packing of the enzyme: S100A and C180G. In some embodiments, an amino acid substitution at residue S100 relative to SEQ ID NO: 13 affects the polarity of the residue. For example, the amino acid substitution S100A relative to SEQ ID NO: 13 switches the residue from a non-charged polar residue to a nonpolar aliphatic residue, which may increase the hydrophobicity of the internal region and may favorably contribute to protein folding and protein packing. In some embodiments, an amino acid substitution at residue C180 relative to SEQ ID NO: 13 affects the polarity of the residue. For example, the amino acid substitution C180G relative to SEQ ID NO: 13 switches the residue from a non-charged polar residue to a nonpolar aliphatic residue, which may increase the hydrophobicity of the internal region and may favorably contribute to protein folding and protein packing.

[0365] In some embodiments, one or more amino acid substitutions in a CBDAS increases product specificity of the CBDAS, such as specificity for a compound of formula (9), CBCA, CBDVA, or a combination thereof, as compared to a CBDAS without such a substitution.

[0366] In some embodiments, one or more amino acid substitutions in a CBDAS increases product titer, as compared to a CBDAS without such an amino acid substitution. In some embodiments, the one or more amino acid substitutions is at residue A414 relative to SEQ ID NO: 13. In some embodiments, the amino acid substitution is A414V relative to SEQ ID NO: 13.

### Cannabichromenic Acid Synthase (CBCAS)

[0367] A host cell described in this application may comprise a TS that is a cannabichromenic acid synthase (CBCAS). As used in this application, a “CBCAS” refers to an enzyme that is capable of catalyzing oxidative cyclization of a prenyl moiety (e.g., terpene) of a compound of Formula (8) to produce a compound of Formula (11). In some embodiments, a compound of Formula (11) is a compound of Formula (11a) (cannabichromenic acid (CBCA)), CBCVA, or a compound of Formula (8) with R as a C7 alkyl (heptyl) group. A CBCAS may use cannabigerolic acid (CBGA) as a substrate. In some embodiments, a CBCAS produces cannabichromenic acid (CBCA) from cannabigerolic acid (CBGA). In some embodiments, the CBCAS may catalyze the oxidative cyclization of other substrates, such as 3-geranyl-2,4-dihydro-6-alkylbenzoic acids like cannabigerovarinic acid (CBGVA), or a substrate of Formula (8) with R as a C7 alkyl (heptyl) group. In some embodiments, the CBCAS exhibits specificity for CBGA substrates.

[0368] In some embodiments, a CBCAS is from Cannabis. In C. sativa, an amino acid sequence encoding CBCAS is provided by, and incorporated by reference from, SEQ ID NO:2 disclosed in U.S. Patent Publication No. 2017/0211049. In other embodiments, a CBCAS may be a THCAS described in and incorporated by reference from U.S. Pat. No. 9,359,625. SEQ ID NO:2 disclosed in U.S. Patent Publication No. 2017/0211049 (corresponding to SEQ ID NO: 15 in this application) has the amino acid sequence:

MNCSTFSFWFVCKIIFFFLSFNIQISIANPQENFLKCFS
EYIPNNPANPKFIYTQHDQLYMSVLNSTIQNLRFTSDTTPKPLVIVTPSN
VSHIQASILCSKKVGLQIRTRSGGHDAEGLSYISQVPFAIVDLRNMHTVK
VDIHSQTAWVEAGATLGEVYYWINEMNENFSFPGGYCPTVGVGGHFSGGG
YGALMRNYGLAADNIIDAHLVNVDGKVLDRKSMGEDLFWAIRGGGGENFG
IIAACKIKLVVVPSKATIFSVKKNMEIHGLVKLENKWQNIAYKYDKDLML
TTHFRTRNITDNHGKNKTTVHGYFSSIFLGGVDSLVDLMNKSFPELGIKK
TDCKELSWIDTTIFYSGVVNYNTANFKKEILLDRSAGKKTAFSIKLDYVK
KLIPETAMVKILEKLYEEEVGVGMYVLYPYGGIMDEISESAIPFPHRAGI
MYELWYTATWEKQEDNEKHINWVRSVYNFTTPYVSQNPRLAYLNYRDLDL
GKTNPESPNNYTQARIWGEKYFGKNFNRLVKVKTKADPNNFFRNEQSIPP
LPPRHH.

[0369] In some embodiments, a CBCAS comprises the sequence shown below:

(SEQ ID NO: 25)
NPQENFLKCFSEYIPNNPANPKFIYTQHDQLYMSVLNSTIQNLRFTSDT
TPKPLVIVTPSNVSHIQASILCSKKVGLQIRTRSGGHDAEGLSYISQVPF
AIVDLRNMHTVKVDIHSQTAWVEAGATLGEVYYWINEMNENFSFPGGYCP
TVGVGGHFSGGGYGALMRNYGLAADNIIDAHLVNVDGKVLDRKSMGEDLF
WAIRGGGGENFGIIAACKIKLVVVPSKATIFSVKKNMEIHGLVKLFNKWQ
NIAYKYDKDLMLTTHFRTRNITDNHGKNKTTVHGYFSSIFLGGVDSLVDL
MNKSFPELGIKKTDCKELSWIDTTIFYSGVVNYNTANFKKEILLDRSAGK
KTAFSIKLDYVKKLIPETAMVKILEKLYEEEVGVGMYVLYPYGGIMDEIS
ESAIPFPHRAGIMYELWYTATWEKQEDNEKHINWVRSVYNFTTPYVSQNP
RLAYLNYRDLDLGKTNPESPNNYTQARIWGEKYFGKNFNRLVKVKTKADP
NNFFRNEQSIPPLPPRHH.

[0370] Additional CBCASs are disclosed in and incorporated by reference from PCT Application No. PCT/US21/24398.

[0371] As described in the Examples section, novel CBCAS enzymes were identified in this disclosure that are capable of catalyzing the conversion of a compound of Formula (8) to produce a compound of Formula (11) and that can be functionally expressed in host cells. Without being bound by a particular theory, the novel CBCAS enzymes disclosed in this application may be useful for engineering to alter the activity and/or abundance of the CBCAS (e.g., change the product profile, substrate profile, and/or kinetics (e.g., Kcat/Vmax and/or Kd) of the TS).

[0372] In some embodiments, a CBCAS comprises the amino acid sequence of any one of SEQ ID NOs: 15, 39, 137-140, 142-143, 145-150, 154, 157, 159, 161, 162, 164, 167, 169, 173, 174, 177-193, 195, 196, 199, 204-206, 464-466, 488, 489, 492-498, 500, 502, 503, 506, 507-548, 550, 551, 552, 565, 574, 595, 597, 602, 698-882, and 993.

[0373] In some embodiments, a CBCAS comprises the nucleotide sequence of any one of SEQ ID NOs: 30, 46-49, 51, 52, 54-59, 63, 66, 68, 70, 71, 73, 76, 78, 82, 83, 86-91, 102, 104, 105, 108, 113-115, 322-324, 346, 347, 350, 351-356, 358, 360, 361, 364-406, 408, 409, 410, 423, 432, 453, 455, 460, 952-1138, and 1189.

[0374] In some embodiments, a CBCAS comprises a nucleic acid or protein sequence that is at least 5%, at least 10%, at least 15%, at least 20%, at least 25%, at least 30%, at least 35%, at least 40%, at least 45%, at least 50%, at least 55%, at least 60%, at least 65%, at least 70%, at least 71%, at least 72%, at least 73%, at least 74%, at least 75%, at least 76%, at least 77%, at least 78%, at least 79%, at least 80%, at least 81%, at least 82%, at least 83%, at least 84%, at least 85%, at least 86%, at least 87%, at least 88%, at least 89%, at least 90%, at least 91%, at least 92%, at least 93%, at least 94%, at least 95%, at least 96%, at least 97%, at least 98%, at least 99%, or is 100% identical, including all values in between, to one or more of SEQ ID NOs: 15, 30, 39, 46-49, 51, 52, 54-59, 63, 66, 68, 70, 71, 73, 76, 78, 82, 83, 86-91, 102, 104, 105, 108, 113-115, 137-140, 142-143, 145-150, 154, 157, 159, 161, 162, 164, 167, 169, 173, 174, 177-193, 195, 196, 199, 204-206, 322-324, 346, 347, 350, 351-356, 358, 360, 361, 364-406, 408, 409, 410, 423, 432, 453, 455, 460, 464-466, 488, 489, 492-498, 500, 502, 503, 506, 507-548, 550, 551, 552, 565, 574, 595, 597, 602, 698-882, 933, 952-1138, and/or 1189 or to any TS disclosed in this application. In some embodiments, a TS comprises a sequence that is at most 5%, at most 10%, at most 15%, at most 20%, at most 25%, at most 30%, at most 35%, at most 40%, at most 45%, at most 50%, at most 55%, at most 60%, at most 65%, at most 70%, at most 71%, at most 72%, at most 73%, at most 74%, at most 75%, at most 76%, at most 77%, at most 78%, at most 79%, at most 80%, at most 81%, at most 82%, at most 83%, at most 84%, at most 85%, at most 86%, at most 87%, at most 88%, at most 89%, at most 90%, at most 91%, at most 92%, at most 93%, at most 94%, at most 95%, at most 96%, at most 97%, at most 98%, at most 99%, or is 100% identical, including all values in between, to one or more of SEQ ID NOs: 15, 30, 39, 46-49, 51, 52, 54-59, 63, 66, 68, 70, 71, 73, 76, 78, 82, 83, 86-91, 102, 104, 105, 108, 113-115, 137-140, 142-143, 145-150, 154, 157, 159, 161, 162, 164, 167, 169, 173, 174, 177-193, 195, 196, 199, 204-206, 322-324, 346, 347, 350, 351-356, 358, 360, 361, 364-406, 408, 409, 410, 423, 432, 453, 455, 460, 464-466, 488, 489, 492-498, 500, 502, 503, 506, 507-548, 550, 551, 552, 565, 574, 595, 597, 602, 698-882, 933, 952-1138, and/or 1189 or to any TS disclosed in this application. In some embodiments, a CBCAS comprises a sequence that is 5%, 10%, 15%, 20%, 25%, 30%, 35%, 40%, 45%, 50%, 55%, 60%, 65%, 70%, 71%, 72%, 73%, 74%, 75%, 76%, 77%, 78%, 79%, 80%, 81%, 82%, 83%, 84%, 85%, 86%, 87%, 88%, 89%, 90%, 91%, 92%, 93%, 94%, 95%, 96%, 97%, 98%, 99%, or 100% identical, including all values in between, to one or more of SEQ ID NOs: 15, 30, 39, 46-49, 51, 52, 54-59, 63, 66, 68, 70, 71, 73, 76, 78, 82, 83, 86-91, 102, 104, 105, 108, 113-115, 137-140, 142-143, 145-150, 154, 157, 159, 161, 162, 164, 167, 169, 173, 174, 177-193, 195, 196, 199, 204-206, 322-324, 346, 347, 350, 351-356, 358, 360, 361, 364-406, 408, 409, 410, 423, 432, 453, 455, 460, 464-466, 488, 489, 492-498, 500, 502, 503, 506, 507-548, 550, 551, 552, 565, 574, 595, 597, 602, 698-882, 933, 952-1138, and/or 1189 or to any TS disclosed in this application.

[0375] In some embodiments, a CBCAS comprises a sequence that is at least 5%, 10%, 15%, 20%, 25%, 30%, 35%, 40%, 45%, 50%, 55%, 60%, 65%, 70%, 71%, 72%, 73%, 74%, 75%, 76%, 77%, 78%, 79%, 80%, 81%, 82%, 83%, 84%, 85%, 86%, 87%, 88%, 89%, 90%, 91%, 92%, 93%, 94%, 95%, 96%, 97%, 98%, 99%, or 100% identical to one or more SEQ ID NOs: 15, 30, 39, 46-49, 51, 52, 54-59, 63, 66, 68, 70, 71, 73, 76, 78, 82, 83, 86-91, 102, 104, 105, 108, 113-115, 137-140, 142-143, 145-150, 154, 157, 159, 161, 162, 164, 167, 169, 173, 174, 177-193, 195, 196, 199, 204-206, 322-324, 346, 347, 350, 351-356, 358, 360, 361, 364-406, 408, 409, 410, 423, 432, 453, 455, 460, 464-466, 488, 489, 492-498, 500, 502, 503, 506, 507-548, 550, 551, 552, 565, 574, 595, 597, 602, 698-882, 933, 952-1138, and/or 1189, wherein the sequence is linked to one or more signal peptides. In some embodiments, a signal peptide that comprises SEQ ID NO: 16 or a sequence that has no more than two amino acid substitutions, insertions, additions, or deletions relative to the sequence of SEQ ID NO: 16 is linked to the N-terminus of the sequence that is at least 5%, 10%, 15%, 20%, 25%, 30%, 35%, 40%, 45%, 50%, 55%, 60%, 65%, 70%, 71%, 72%, 73%, 74%, 75%, 76%, 77%, 78%, 79%, 80%, 81%, 82%, 83%, 84%, 85%, 86%, 87%, 88%, 89%, 90%, 91%, 92%, 93%, 94%, 95%, 96%, 97%, 98%, 99%, or 100% identical to one or more of SEQ ID NOs: 15, 30, 39, 46-49, 51, 52, 54-59, 63, 66, 68, 70, 71, 73, 76, 78, 82, 83, 86-91, 102, 104, 105, 108, 113-115,137-140, 142-143, 145-150, 154, 157, 159, 161, 162, 164, 167, 169, 173, 174, 177-193, 195, 196, 199, 204-206, 322-324, 346, 347, 350, 351-356, 358, 360, 361, 364-406, 408, 409, 410, 423, 432, 453, 455, 460, 464-466, 488, 489, 492-498, 500, 502, 503, 506, 507-548, 550, 551, 552, 565, 574, 595, 597, 602, 698-882, 933, 952-1138, and/or 1189. In some embodiments, a methionine residue is added to the N-terminus of SEQ ID NO: 16. In some embodiments, a signal peptide that comprises SEQ ID NO: 17 or a sequence that has no more than one amino acid substitution, insertion, addition, or deletion relative to the sequence of SEQ ID NO: 17 is linked to the carboxyl terminus of the sequence that is at least 5%, 10%, 15%, 20%, 25%, 30%, 35%, 40%, 45%, 50%, 55%, 60%, 65%, 70%, 71%, 72%, 73%, 74%, 75%, 76%, 77%, 78%, 79%, 80%, 81%, 82%, 83%, 84%, 85%, 86%, 87%, 88%, 89%, 90%, 91%, 92%, 93%, 94%, 95%, 96%, 97%, 98%, 99%, or 100% identical to one or more of SEQ ID NOs: 15, 30, 39, 46-49, 51, 52, 54-59, 63, 66, 68, 70, 71, 73, 76, 78, 82, 83, 86-91, 102, 104, 105, 108, 113-115, 137-140, 142-143, 145-150, 154, 157, 159, 161, 162, 164, 167, 169, 173, 174, 177-193, 195, 196, 199, 204-206, 322-324, 346, 347, 350, 351-356, 358, 360, 361, 364-406, 408, 409, 410, 423, 432, 453, 455, 460, 464-466, 488, 489, 492-498, 500, 502, 503, 506, 507-548, 550, 551, 552, 565, 574, 595, 597, 602, 698-882, 933, 952-1138, and/or 1189.

[0376] In some embodiments, a CBCAS comprises an amino acid deletion or substitution at a residue shown in Table 17, Table 18, or Table 19.

[0377] In some embodiments, a CBCAS comprises an amino acid substitution, addition, deletion or insertion at a residue corresponding to position 69, 100, 116, 289, 382, 414, 416, and/or 441 in SEQ ID NO: 13.

[0378] In some embodiments, the CBCAS comprises the amino acid Q or R at a residue corresponding to position 69 in SEQ ID NO: 13; the CBCAS comprises the amino acid A at a residue corresponding to position 100 in SEQ ID NO: 13; the CBCAS comprises the amino acid A or G at a residue corresponding to position 116 in SEQ ID NO: 13; the CBCAS comprises the amino acid F or W at a residue corresponding to position 289 in SEQ ID NO: 13; the amino acid S at a residue corresponding to position 382 in SEQ ID NO: 13; the CBCAS comprises the amino acid M or V at a residue corresponding to position 414 in SEQ ID NO: 13; the CBCAS comprises the amino acid F at a residue corresponding to position 416 in SEQ ID NO: 13; and/or the amino acid T or S at a residue corresponding to position 441 in SEQ ID NO: 13.

[0379] In some embodiments, a CBCAS comprises an amino acid substitution, addition, deletion or insertion at a residue corresponding to position 31, 40, 41, 46, 47, 49, 51, 52, 56, 58, 61, 63, 74, 90, 95, 96, 103, 116, 129, 136, 143, 158, 173, 181, 237, 242, 247, 255, 257, 268, 273, 288, 290, 296, 302, 309, 311, 318, 340, 344, 345, 351, 354, 360, 361, 363, 377, 378, 379, 382, 396, 411, 424, 425, 430, 442, 443, 446, 447, 459, 462, 464, 465, 469, 475, 479, 489, 491, 492, 493, 494, 495, 496, 516, 524, 528, 542, 543, and/or 544 in SEQ ID NO: 14.

[0380] In some embodiments, the CBCAS comprises the amino acid Q at a residue corresponding to position 31 in SEQ ID NO: 14; the amino acid E at a residue corresponding to position 40 in SEQ ID NO: 14; the amino acid Y at a residue corresponding to position 41 in SEQ ID NO: 14; the amino acid P at a residue corresponding to position 46 in SEQ ID NO: 14; the amino acid T at a residue corresponding to position 47 in SEQ ID NO: 14; the amino acid A at a residue corresponding to position 49 in SEQ ID NO: 14; the amino acid F at a residue corresponding to position 51 in SEQ ID NO: 14; the amino acid I at a residue corresponding to position 52 in SEQ ID NO: 14; the amino acid N at a residue corresponding to position 56 in SEQ ID NO: 14; the amino acid S at a residue corresponding to position 58 in SEQ ID NO: 14; the amino acid S at a residue corresponding to position 61 in SEQ ID NO: 14; the amino acid V or L at a residue corresponding to position 63 in SEQ ID NO: 14; the amino acid T at a residue corresponding to position 74 in SEQ ID NO: 14; the amino acid V at a residue corresponding to position 90 in SEQ ID NO: 14; the amino acid G at a residue corresponding to position 95 in SEQ ID NO: 14; the amino acid S at a residue corresponding to position 96 in SEQ ID NO: 14; the amino acid I at a residue corresponding to position 103 in SEQ ID NO: 14; the amino acid S at a residue corresponding to position 116 in SEQ ID NO: 14; the amino acid I at a residue corresponding to position 129 in SEQ ID NO: 14; the amino acid R at a residue corresponding to position 136 in SEQ ID NO: 14; the amino acid E at a residue corresponding to position 143 in SEQ ID NO: 14; the amino acid L at a residue corresponding to position 158 in SEQ ID NO: 14; the amino acid A at a residue corresponding to position 173 in SEQ ID NO: 14, the amino acid A at a residue corresponding to position 181 in SEQ ID NO: 14; the amino acid S at a residue corresponding to position 237 in SEQ ID NO: 14; the amino acid V at a residue corresponding to position 242 in SEQ ID NO: 14; the amino acid R at a residue corresponding to position 247 in SEQ ID NO: 14; the amino acid V at a residue corresponding to position 255 in SEQ ID NO: 14; the amino acid M at a residue corresponding to position 257 in SEQ ID NO: 14; the amino acid E at a residue corresponding to position 268 in SEQ ID NO: 14; the amino acid V at a residue corresponding to position 273 in SEQ ID NO: 14; the amino acid L at a residue corresponding to position 288 in SEQ ID NO: 14; the amino acid F at a residue corresponding to position 290 in SEQ ID NO: 14; the amino acid R at a residue corresponding to position 296 in SEQ ID NO: 14; the amino acid Q at a residue corresponding to position 302 in SEQ ID NO: 14; the amino acid I at a residue corresponding to position 309 in SEQ ID NO: 14; the amino acid S at a residue corresponding to position 311 in SEQ ID NO: 14; the amino acid L at a residue corresponding to position 318 in SEQ ID NO: 14; the amino acid E at a residue corresponding to position 340 in SEQ ID NO: 14; the amino acid Q at a residue corresponding to position 344 in SEQ ID NO: 14; the amino acid L at a residue corresponding to position 345 in SEQ ID NO: 14; the amino acid I at a residue corresponding to position 351 in SEQ ID NO: 14; the amino acid F at a residue corresponding to position 354 in SEQ ID NO: 14; the amino acid Y at a residue corresponding to position 360 in SEQ ID NO: 14; the amino acid D at a residue corresponding to position 361 in SEQ ID NO: 14; the amino acid T at a residue corresponding to position 363 in SEQ ID NO: 14; the amino acid Q at a residue corresponding to position 377 in SEQ ID NO: 14; the amino acid N at a residue corresponding to position 378 in SEQ ID NO: 14; the amino acid A at a residue corresponding to position 379 in SEQ ID NO: 14; the amino acid S at a residue corresponding to position 382 in SEQ ID NO: 14; the amino acid V at a residue corresponding to position 396 in SEQ ID NO: 14; the amino acid V at a residue corresponding to position 411 in SEQ ID NO: 14; the amino acid D at a residue corresponding to position 424 in SEQ ID NO: 14; the amino acid K at a residue corresponding to position 425 in SEQ ID NO: 14; the amino acid T at a residue corresponding to position 430 in SEQ ID NO: 14; the amino acid I at a residue corresponding to position 442 in SEQ ID NO: 14; the amino acid I or V at a residue corresponding to position 443 in SEQ ID NO: 14; the amino acid I at a residue corresponding to position 446 in SEQ ID NO: 14; the amino acid C at a residue corresponding to position 447 in SEQ ID NO: 14; the amino acid L at a residue corresponding to position 459 in SEQ ID NO: 14; the amino acid I at a residue corresponding to position 462 in SEQ ID NO: 14; the amino acid N at a residue corresponding to position 464 in SEQ ID NO: 14; the amino acid I at a residue corresponding to position 465 in SEQ ID NO: 14; the amino acid M at a residue corresponding to position 469 in SEQ ID NO: 14; the amino acid K at a residue corresponding to position 475 in SEQ ID NO: 14; the amino acid M at a residue corresponding to position 479 in SEQ ID NO: 14; the amino acid I at a residue corresponding to position 489 in SEQ ID NO: 14; the amino acid I at a residue corresponding to position 491 in SEQ ID NO: 14; the amino acid N at a residue corresponding to position 492 in SEQ ID NO: 14; the amino acid D at a residue corresponding to position 493 in SEQ ID NO: 14; the amino acid F or P at a residue corresponding to position 494 in SEQ ID NO: 14; the amino acid E or K at a residue corresponding to position 495 in SEQ ID NO: 14; the amino acid N at a residue corresponding to position 496 in SEQ ID NO: 14; the amino acid D at a residue corresponding to position 516 in SEQ ID NO: 14; the amino acid L at a residue corresponding to position 524 in SEQ ID NO: 14; the amino acid D at a residue corresponding to position 528 in SEQ ID NO: 14; the amino acid L or R at a residue corresponding to position 542 in SEQ ID NO: 14; the amino acid R at a residue corresponding to position 543 in SEQ ID NO: 14; and/or the amino acid R at a residue corresponding to position 544 in SEQ ID NO: 14.

[0381] In some embodiments, a CBCAS comprises an amino acid substitution, addition, deletion or insertion at a residue corresponding to position 31, 40, 41, 44, 46, 47, 49, 51, 52, 53, 54, 58, 59, 60, 63, 74, 85, 88, 90, 95, 96, 97, 98, 131, 138, 165, 169, 171, 173, 175, 181, 183, 208, 239, 244, 247, 249, 254, 259, 268, 270, 273, 275, 282, 284, 286, 288, 290, 296, 298, 302, 304, 308, 309, 311, 313, 320, 344, 345, 346, 347, 351, 353, 357, 360, 362, 363, 365, 375, 377, 379, 380, 381, 384, 395, 396, 397, 398, 399, 409,411, 415, 424, 425, 426,430, 440, 443, 446, 447, 448, 459, 461, 462, 464, 465, 466, 469, 471, 475, 489, 491, 492, 493, 494, 495, 496, 497, 516, 524, 525, 527, 542, 544, and/or 546 in SEQ ID NO: 20.

[0382] In some embodiments, the CBCAS comprises the amino acid R at a residue corresponding to position 31 in SEQ ID NO: 20; the amino acid K or Q at a residue corresponding to position 40 in SEQ ID NO: 20; the amino acid H at a residue corresponding to position 41 in SEQ ID NO: 20; the amino acid T at a residue corresponding to position 44 in SEQ ID NO: 20; the amino acid A or V at a residue corresponding to position 46 in SEQ ID NO: 20; the amino acid T at a residue corresponding to position 47 in SEQ ID NO: 20; the amino acid S or A at a residue corresponding to position 49 in SEQ ID NO: 20; the amino acid L or A at a residue corresponding to position 51 in SEQ ID NO: 20; the amino acid V at a residue corresponding to position 52 in SEQ ID NO: 20; the amino acid L at a residue corresponding to position 53 in SEQ ID NO: 20; the amino acid V at a residue corresponding to position 54 in SEQ ID NO: 20; the amino acid N at a residue corresponding to position 58 in SEQ ID NO: 20; the amino acid F at a residue corresponding to position 59 in SEQ ID NO: 20; the amino acid P at a residue corresponding to position 60 in SEQ ID NO: 20; the amino acid I or L at a residue corresponding to position 63 in SEQ ID NO: 20, the amino acid I at a residue corresponding to position 74 in SEQ ID NO: 20; the amino acid I at a residue corresponding to position 85 in SEQ ID NO: 20; the amino acid L at a residue corresponding to position 88 in SEQ ID NO: 20; the amino acid N at a residue corresponding to position 90 in SEQ ID NO: 20; the amino acid G at a residue corresponding to position 95 in SEQ ID NO: 20; the amino acid T at a residue corresponding to position 96 in SEQ ID NO: 20; the amino acid G at a residue corresponding to position 97 in SEQ ID NO: 20; the amino acid T at a residue corresponding to position 98 in SEQ ID NO: 20; the amino acid I at a residue corresponding to position 131 in SEQ ID NO: 20; the amino acid R at a residue corresponding to position 138 in SEQ ID NO: 20; the amino acid N at a residue corresponding to position 165 in SEQ ID NO: 20; the amino acid L at a residue corresponding to position 169 in SEQ ID NO: 20; the amino acid L at a residue corresponding to position 171 in SEQ ID NO: 20; the amino acid A at a residue corresponding to position 173 in SEQ ID NO: 20; the amino acid A at a residue corresponding to position 175 in SEQ ID NO: 20; the amino acid A at a residue corresponding to position 181 in SEQ ID NO: 20; the amino acid A at a residue corresponding to position 183 in SEQ ID NO: 20; the amino acid Q at a residue corresponding to position 208 in SEQ ID NO: 20; the amino acid S at a residue corresponding to position 239 in SEQ ID NO: 20; the amino acid V at a residue corresponding to position 244 in SEQ ID NO: 20; the amino acid R at a residue corresponding to position 247 in SEQ ID NO: 20; the amino acid R at a residue corresponding to position 249 in SEQ ID NO: 20; the amino acid M at a residue corresponding to position 254 in SEQ ID NO: 20; the amino acid M at a residue corresponding to position 259 in SEQ ID NO: 20; the amino acid E at a residue corresponding to position 268 in SEQ ID NO: 20; the amino acid E at a residue corresponding to position 270 in SEQ ID NO: 20; the amino acid V at a residue corresponding to position 273 in SEQ ID NO: 20; the amino acid V at a residue corresponding to position 275 in SEQ ID NO: 20; the amino acid M at a residue corresponding to position 282 in SEQ ID NO: 20; the amino acid E at a residue corresponding to position 284 in SEQ ID NO: 20; the amino acid E at a residue corresponding to position 286 in SEQ ID NO: 20; the amino acid L at a residue corresponding to position 288 in SEQ ID NO: 20; the amino acid F or L at a residue corresponding to position 290 in SEQ ID NO: 20; the amino acid R at a residue corresponding to position 296 in SEQ ID NO: 20; the amino acid Q at a residue corresponding to position 302 in SEQ ID NO: 20; the amino acid Q at a residue corresponding to position 304 in SEQ ID NO: 20; the amino acid T at a residue corresponding to position 308 in SEQ ID NO: 20; the amino acid K or I at a residue corresponding to position 309 in SEQ ID NO: 20; the amino acid S or I at a residue corresponding to position 311 in SEQ ID NO: 20; the amino acid S at a residue corresponding to position 313 in SEQ ID NO: 20; the amino acid L at a residue corresponding to position 320 in SEQ ID NO: 20; the amino acid Q at a residue corresponding to position 344 in SEQ ID NO: 20; the amino acid L at a residue corresponding to position 345 in SEQ ID NO: 20; the amino acid Q at a residue corresponding to position 346 in SEQ ID NO: 20; the amino acid L at a residue corresponding to position 347 in SEQ ID NO: 20; the amino acid I at a residue corresponding to position 351 in SEQ ID NO: 20; the amino acid I at a residue corresponding to position 353 in SEQ ID NO: 20; the amino acid L at a residue corresponding to position 357 in SEQ ID NO: 20; the amino acid Y at a residue corresponding to position 360 in SEQ ID NO: 20; the amino acid Y at a residue corresponding to position 362 in SEQ ID NO: 20; the amino acid T or D at a residue corresponding to position 363 in SEQ ID NO: 20; the amino acid T at a residue corresponding to position 365 in SEQ ID NO: 20; the amino acid G at a residue corresponding to position 375 in SEQ ID NO: 20; the amino acid R at a residue corresponding to position 377 in SEQ ID NO: 20, the amino acid Q or A at a residue corresponding to position 379 in SEQ ID NO: 20; the amino acid N at a residue corresponding to position 380 in SEQ ID NO: 20; the amino acid A at a residue corresponding to position 381 in SEQ ID NO: 20; the amino acid K at a residue corresponding to position 384 in SEQ ID NO: 20; the amino acid S at a residue corresponding to position 395 in SEQ ID NO: 20; the amino acid V at a residue corresponding to position 396 in SEQ ID NO: 20; the amino acid F at a residue corresponding to position 397 in SEQ ID NO: 20; the amino acid V at a residue corresponding to position 398 in SEQ ID NO: 20; the amino acid Q at a residue corresponding to position 399 in SEQ ID NO: 20; the amino acid I at a residue corresponding to position 409 in SEQ ID NO: 20; the amino acid A at a residue corresponding to position 411 in SEQ ID NO: 20; the amino acid A at a residue corresponding to position 415 in SEQ ID NO: 20; the amino acid D at a residue corresponding to position 424 in SEQ ID NO: 20; the amino acid K at a residue corresponding to position 425 in SEQ ID NO: 20; the amino acid at a residue corresponding to position in SEQ ID NO: 20; the amino acid D at a residue corresponding to position 426 in SEQ ID NO: 20; the amino acid T at a residue corresponding to position 430 in SEQ ID NO: 20; the amino acid L at a residue corresponding to position 440 in SEQ ID NO: 20; the amino acid V at a residue corresponding to position 443 in SEQ ID NO: 20; the amino acid I at a residue corresponding to position 446 in SEQ ID NO: 20; the amino acid C at a residue corresponding to position 447 in SEQ ID NO: 20; the amino acid I at a residue corresponding to position 448 in SEQ ID NO: 20; the amino acid L at a residue corresponding to position 459 in SEQ ID NO: 20; the amino acid L at a residue corresponding to position 461 in SEQ ID NO: 20; the amino acid I at a residue corresponding to position 462 in SEQ ID NO: 20; the amino acid N or I at a residue corresponding to position 464 in SEQ ID NO: 20; the amino acid I at a residue corresponding to position 465 in SEQ ID NO: 20; the amino acid N at a residue corresponding to position 466 in SEQ ID NO: 20; the amino acid M at a residue corresponding to position 469 in SEQ ID NO: 20; the amino acid M at a residue corresponding to position 471 in SEQ ID NO: 20; the amino acid K at a residue corresponding to position 475 in SEQ ID NO: 20; the amino acid I at a residue corresponding to position 489 in SEQ ID NO: 20; the amino acid I at a residue corresponding to position 491 in SEQ ID NO: 20; the amino acid N at a residue corresponding to position 492 in SEQ ID NO: 20; the amino acid D at a residue corresponding to position 493 in SEQ ID NO: 20; the amino acid P or N at a residue corresponding to position 494 in SEQ ID NO: 20; the amino acid K at a residue corresponding to position 495 in SEQ ID NO: 20; the amino acid N at a residue corresponding to position 496 in SEQ ID NO: 20; the amino acid K at a residue corresponding to position 497 in SEQ ID NO: 20; the amino acid D at a residue corresponding to position 516 in SEQ ID NO: 20; the amino acid L at a residue corresponding to position 524 in SEQ ID NO: 20; the amino acid V at a residue corresponding to position 525 in SEQ ID NO: 20; the amino acid V at a residue corresponding to position 527 in SEQ ID NO: 20; the amino acid R at a residue corresponding to position 542 in SEQ ID NO: 20; the amino acid R at a residue corresponding to position 544 in SEQ ID NO: 20; and/or the amino acid R at a residue corresponding to position 546 in SEQ ID NO: 20.

[0383] In some embodiments, the CBCAS comprises any combination of amino acid substitutions shown in Table 17, Table 18, or Table 19.

[0384] In some embodiments, a CBCAS comprises relative to SEQ ID NO: 14: R31Q, K40Q, H41Y, H56N, M61S, I74T, N90V, V129I, S255V, V288L, M290F, K296R, T340E, F345L, T3511, F360Y, A411V, E424D, Q475K, T492N, H494P, and A495E; R31Q, K40Q, H41Y, V46P, H56N, Q58S, M61S, 174T, N90V, V1291, S255V, V288L, M290F, K296R, T340E, F345L, F360Y, A411V, E424D, T446L, Q475K, T492N, H494P, and A495E; R31Q, K40Q, H41Y, V46P, M61S, I74T, N90V, V1291, S255V, V288L, M290F, K296R, T340E, F345L, F360Y, A411V, E424D, T492N, H494P, and A495E; R31Q, K40Q, H41Y, V46P, M61S, 174T, N90V, V129I, S255V, V288L, M290F, K296R, T340E, F345L, F360Y, A411V, E424D, T492N, H494P, and A495E; R31Q, K40Q, H41Y, V46P, H56N, Q58S, M61S, I74T, N90V, V1291, V158L, S255V, V288L, M290F, K296R, T340E, F345L, F360Y, A411V, E424D, Q475K, T492N, H494P, and A495E; R31Q, K40Q, H41Y, Q58S, M61S, 174T, N90V, V129I, H143E, S255V, V288L, M290F, K296R, T340E, F345L, F360Y, A411V, E424D, Q475K, T492N, H494P, and A495E; R31Q, K40Q, H41Y, M61 S, 174T, N90V, V129I, S255V, V288L, M290F, K296R, T340E, F345L, F360Y, A411V, E424D, Q475K, T492N, H494P, and A495E; R31Q, K40Q, H41Y, V46P, H56N, M61S, 174T, N90V, V1291, H143E, S255V, V288L, M290F, K296R, T340E, F345L, Y354F, F360Y, A411V, E424D, Q475K, T492N, H494P, and A495E; R31Q, K40Q, H41Y, H56N, Q58S, M61S, I74T, N90V, V1291, S255V, V288L, M290F, K296R, T340E, F345L, F360Y, A411V, E424D, Q475K, T492N, H494P, and A495E; R31Q, K40Q, H41Y, 174T, N90V, V129I, H143E, S255V, V288L, M290F, K296R, F345L, F360Y, A411V, E424D, T492N, H494P, and A495E; or R31Q, K40Q, H41Y, V46P, V52I, H56N, Q58S, M61 S, I74T, N90V, V1291, S255V, V288L, M290F, K296R, T340E, F345L, F360Y, A411V, E424D, Q475K, T492N, H494P, and A495E.

[0385] In some embodiments, a CBCAS comprises relative to SEQ ID NO: 13: T47A, L49P, N56H, N57D, P58Q, H69Q, H89N, and G95A.

[0386] In some embodiments, a CBCAS comprises relative to SEQ ID NO: 14: R31Q, K40Q, H41Y, H56N, M61S, 174T, N90V, V129I, S255V, V288L, M290F, K296R, T340E, F345L, T351I, F360Y, A411V, E424D, Q475K, T492N, H494P, and A495E; R31Q, K40Q, H41 Y, V46P, H56N, Q58S, M61S, 174T, N90V, V1291, S255V, V288L, M290F, K296R, T340E, F345L, F360Y, A411V, E424D, T446I, Q475K, T492N, H494P, and A495E; R31Q, K40Q, H41Y, V46P, M61S, I74T, N90V, V1291, S255V, V288L, M290F, K296R, T340E, F345L, F360Y, A411V, E424D, T492N, H494P, and A495E; R31Q, K40Q, H41Y, V46P, H56N, M61S, I74T, N90V, V129L, S255V, V288L, M290F, K296R, F345L, F360Y, A411V, E424D, T492N, H494P, and A495E; R31Q, K40Q, H41Y, V46P, H56N, Q58S, M61S, 174T, N90V, V129I, V158L. S255V, V288L, M290F, K296R, T340E, F345L, F360Y, A411V, E424D, Q475K, T492N, H494P, and A495E; R31Q, K40Q, H41Y, Q58S, M61S, I74T, N90V, V1291, H143E, S255V, V288L, M290F, K296R, T340E, F345L, F360Y, A411V, E424D, Q475K, T492N, H494P, and A495E; R31 Q, K40Q, H41Y, M61S, I74T, N90V, V1291, S255V, V288L, M290F, K296R, T340E, F345L, F360Y, A411V, E424D, Q475K, T492N, H494P, and A495E; R31Q, K40Q, H41Y, V46P, H56N, M61S, I74T, N90V, V129I, H143E, S255V, V288L, M290F, K296R, T340E, F345L, Y354F, F360Y, A411V, E424D, Q475K, T492N, H494P, and A495E; R31Q, K40Q, H41Y, H56N, Q58S, M61S, I74T, N90V, V129I, S255V, V288L, M290F, K296R, T340E, F345L, F360Y, A411V, E424D, Q475K, T492N, H494P, and A495E; or R31Q, K40Q, H41Y, V46P, V52I, H56N, Q58S, M61S, I74T, N90V, V129I, S255V, V288L, M290F, K296R, T340E, F345L, F360Y, A411V, E424D, Q475K, T492N, H494P, and A495E.

[0387] In some embodiments, a CBCAS comprises relative to SEQ ID NO: 14: Q58S, V288L, and F345L; R31Q, V52I, H56N, Q58S, M61S, I74T, N90V, A250P, S255V, F345L, Q475K, and T492N; R31Q, H56N, 174T, N90V, H143E, A250P, S255V, Q475K, and T492N; R31Q, H56N, I74T, N90V, A250P, S255V, L443I, Q475K, and T492N; H56N, M61S, N90V, A250D, S255V, V288L, Q475K, T492N, and A495E; R31Q, H56N, I74T, N90V, K215R, A250P, S255V, Q475K, and T492N; R31Q, P49A, H56N, Q58S, M61S, I74T, N90V, H143E, A250P, S255V, V288L, F345L, Q475K, and T492N; R31Q, A47T, H56N, I74T, N90V, A250P, S255V, Q475K, and T492N; M61S, N90V, A250D, S255V, Q475K, T492N, A495E, and N498T; R31Q, H56N, M61S, I74T, N89H, N90V, S100A, H136R, E150Q, N196K, N211D, A250P, S255V, V288M, F345M, S382K, L443I, Q475K, and T492N; R31Q, H56N, Q58S, M61S, I74T, N90V, H143E, A250P, S255V, V288L, T340E, F345L, E424D, Q475K, and T492N; R31Q, H56N, I74T, S88L, N90V, A250P, S255V, Q475K, and T492N; R31Q, V52I, H56N, Q58S, M61S, I74T, N90V, H143E, A250P, S255V, V288L, F345L, Q475K, and T492N; R31Q, H56N, Q58S, M61S, 174T, N90V, H143E, A250P, S255V, V288L, T340E, F345L, E424D, Q475K, and T492N; R31Q, H56N, Q58S, M61S, I74T, N90V, H143E, A250P, S255V, V288L, F345L, A411V, Q475K, and T492N; R31Q, V52I, H56N, Q58S, M61S, I74T, N90V, A250P, S255V, V288L, F345L, Q475K, and T492N; R31Q, K50L, H56N, I74T, N90V, A250P, S255V, Q475K, and T492N; R31Q, A47T, V52I, H56N, Q58S, M61S, I74T, N90V, H143E, A250P, S255V, V288L, T340E, F345L, Q475K, and T492N; or R31Q, H56N, M61S, I74T, N89H, N90V, S100A, N196K, N211D, A250P, S255V, I257R, V288M, F345M, S382K, L443I, Q475K, and T492N.

[0388] In some embodiments, a CBCAS comprises an amino acid insertion at a residue corresponding to position 253 in SEQ ID NO: 13. In some embodiments, the amino acid S is inserted at a residue corresponding to position 253 in SEQ ID NO: 13.

[0389] In some embodiments, one or more amino acid substitutions in a CBCAS causes a shift in product profile from THCA to CBCA, as compared to a CBCAS without such a substitution. In some embodiments, the amino acid substitution is at a residue corresponding to position 158 relative to SEQ ID NO: 14. In some embodiments, the amino acid substitution is V158L relative to SEQ ID NO: 14.

[0390] In some embodiments, one or more amino acid substitutions increases the substrate selectivity of the CBCAS such as the selectivity for a compound of Formula (8), CBGA, CBGVA or a combination thereof, as compared to a CBCAS without such a substitution.

[0391] In some embodiments, one or more amino acid substitutions increases the product specificity of the CBCAS, such as the specificity for a compound of Formula (11), CBCA, CBCVA or a combination thereof, as compared to a CBCAS without such a substitution. In some embodiments, one or more amino acid substitutions increases the product specificity of the CBCAS for CBCVA. In some embodiments, the amino acid substitution is at a residue corresponding to position 446 relative to SEQ ID NO: 14, a position that is predicted to be within 4 angstroms of the substrate binding site of the CBCAS. In some embodiments, the amino acid substitution is T4461 relative to SEQ ID NO: 14, which alters the residue from an uncharged polar residue to a bulkier hydrophobic residue.

[0392] In some embodiments, a CBCAS comprises one or more amino acid substitutions that alter the secondary or tertiary structure of the CBCAS, as compared to a CBCAS without such a substitution. In some embodiments, one or more amino acid substitutions are close to the active site. In some embodiments, the one or more amino acid substitutions are Y354F and/or A411V relative to SEQ ID NO:14.

### Additional Cannabinoid Pathway Enzymes

[0393] Methods for production of cannabinoids and cannabinoid precursors can further include expression of one or more of: an acyl activating anzyme (AAE); a polyketide synthase (PKS) (e.g., OLS); a polykeide cyclase (PKC); and a prenyltransferase (PT).

### Acyl Activating Enzyme (AAE)

[0394] A host cell described in this disclosure may comprise an AAE. As used in this disclosure, an AAE refers to an enzyme that is capable of catalyzing the esterification between a thiol and a substrate (e.g., optionally substituted aliphatic or aryl group) that has a carboxylic acid moiety. In some embodiments, an AAE is capable of using Formula (1):

[chemical structure]

or a salt, solvate, hydrate, polymorph, co-crystal, tautomer, stereoisomer, isotopically labeled derivative thereof to produce a product of Formula (2):

[chemical structure]

[0395] R is as defined in this application. In certain embodiments, R is hydrogen. In certain embodiments, R is optionally substituted alkyl. In certain embodiments, R is optionally substituted C1-40 alkyl. In certain embodiments, R is optionally substituted C2-40 alkyl. In certain embodiments, R is optionally substituted C2-40 alkyl, which is straight chain or branched alkyl. In certain embodiments, R is optionally substituted C2-10 alkyl, optionally substituted C10-C20 alkyl, optionally substituted C20-C30 alkyl, optionally substituted C30-C40 alkyl, or optionally substituted C40-C50 alkyl, which is straight chain or branched alkyl. In certain embodiments, R is optionally substituted C3-8 alkyl. In certain embodiments, R is optionally substituted C1-C40 alkyl, C1-C20 alkyl, C1-C10 alkyl, C1-C8 alkyl, C1-C5 alkyl, C3-C5 alkyl, C3 alkyl, or C5 alkyl. In certain embodiments, R is optionally substituted C1-C20 alkyl. In certain embodiments, R is optionally substituted C1-C20 branched alkyl. In certain embodiments, R is optionally substituted C1-C20 alkyl, optionally substituted C1-C10 alkyl, optionally substituted C10-C20 alkyl, optionally substituted C20-C30 alkyl, optionally substituted C30-C40 alkyl, or optionally substituted C40-C50 alkyl. In certain embodiments, R is optionally substituted C1-C10 alkyl. In certain embodiments, R is optionally substituted C3 alkyl. In certain embodiments, R is optionally substituted n-propyl. In certain embodiments, R is unsubstituted n-propyl. In certain embodiments, R is optionally substituted C1-C8 alkyl. In some embodiments, R is a C2-C6 alkyl. In certain embodiments, R is optionally substituted C1-C5 alkyl. In certain embodiments, R is optionally substituted C3-C5 alkyl. In certain embodiments, R is optionally substituted C3 alkyl. In certain embodiments, R is optionally substituted C5 alkyl. In certain embodiments, R is of formula:

[chemical structure]

In certain embodiments, R is of formula:

[chemical structure]

In certain embodiments, R is of formula:

[chemical structure]

In certain embodiments, R is of formula:

[chemical structure]

In certain embodiments, R is optionally substituted propyl. In certain embodiments, R is optionally substituted n-propyl. In certain embodiments, R is n-propyl optionally substituted with optionally substituted aryl. In certain embodiments, R is n-propyl optionally substituted with optionally substituted phenyl. In certain embodiments, R is n-propyl substituted with unsubstituted phenyl. In certain embodiments, R is optionally substituted butyl. In certain embodiments, R is optionally substituted n-butyl. In certain embodiments, R is n-butyl optionally substituted with optionally substituted aryl. In certain embodiments, R is n-butyl optionally substituted with optionally substituted phenyl. In certain embodiments, R is n-butyl substituted with unsubstituted phenyl. In certain embodiments, R is optionally substituted pentyl. In certain embodiments, R is optionally substituted n-pentyl. In certain embodiments, R is n-pentyl optionally substituted with optionally substituted aryl. In certain embodiments, R is n-pentyl optionally substituted with optionally substituted phenyl. In certain embodiments, R is n-pentyl substituted with unsubstituted phenyl. In certain embodiments, R is optionally substituted hexyl. In certain embodiments, R is optionally substituted n-hexyl. In certain embodiments, R is optionally substituted n-heptyl. In certain embodiments, R is optionally substituted n-octyl. In certain embodiments, R is alkyl optionally substituted with aryl (e.g., phenyl). In certain embodiments, R is optionally substituted acyl (e.g., —C(═O)Me).

[0396] In certain embodiments, R is optionally substituted alkenyl (e.g., substituted or unsubstituted C₂₋₆ alkenyl). In certain embodiments, R is substituted or unsubstituted C₂₋₆ alkenyl. In certain embodiments, R is substituted or unsubstituted C₂₋₅ alkenyl. In certain embodiments, R is of formula:

[chemical structure]

In certain embodiments, R is optionally substituted alkynyl (e.g., substituted or unsubstituted C₂₋₆ alkynyl). In certain embodiments, R is substituted or unsubstituted C₂₋₆ alkynyl. In certain embodiments, R is of formula:

[chemical structure]

In certain embodiments, R is optionally substituted carbocyclyl. In certain embodiments, R is optionally substituted aryl (e.g., phenyl or napthyl).

[0397] In some embodiments, a substrate for an AAE is produced by fatty acid metabolism within a host cell. In some embodiments, a substrate for an AAE is provided exogenously.

[0398] In some embodiments, an AAE is capable of catalyzing the formation of hexanoyl-coenzyme A (hexanoyl-CoA) from hexanoic acid and coenzyme A (CoA). In some embodiments, an AAE is capable of catalyzing the formation of butanoyl-coenzyme A (butanoyl-CoA) from butanoic acid and coenzyme A (CoA).

[0399] As one of ordinary skill in the art would appreciate, an AAE could be obtained from any source, including naturally occurring sources and synthetic sources (e.g., a non-naturally occurring AAE). In some embodiments, an AAE is a Cannabis enzyme. Non-limiting examples of AAEs include C. sativa hexanoyl-CoA synthetase 1 (CsHCS1) and C. sativa hexanoyl-CoA synthetase 2 (CsHCS2) as disclosed in U.S. Pat. No. 9,546,362, which is incorporated by reference in this application in its entirety.

[0400] CsHCS1 has the sequence:

(SEQ ID NO: 5)
MGKNYKSLDSVVASDFIALGITSEVAETLHGRLAEIVCNYGAATPQTWIN
IANHILSPDLPFSLHQMLFYGCYKDFGPAPPAWIPDPEKVKSTNLGALLE
KRGKEFLGVKYKDPISSFSHFQEFSVRNPEVYWRTVLMDEMKISFSKDPE
CILRRDDINNPGGSEWLPGGYLNSAKNCLNVNSNKKLNDTMIVWRDEGND
DLPLNKLTLDQLRKRVWLVGYALEEMGLEKGCAIAIDMPMHVDAVVIYLA
IVLAGYVVVSIADSFSAPEISTRLRLSKAKAIFTQDHIIRGKKRIPLYSR
VVEAKSPMAIVIPCSGSNIGAELRDGDISWDYFLERAKEFKNCEFTAREQ
PVDAYTNILFSSGTTGEPKAIPWTQATPLKAAADGWSHLDIRKGDVIVWP
TNLGWMMGPWLVYASLLNGASIALYNGSPLVSGFAKFVQDAKVTMLGVVP
SIVRSWKSTNCVSGYDWSTIRCFSSSGEASNVDEYLWLMGRANYKPVIEM
CGGTEIGGAFSAGSFLQAQSLSSFSSQCMGCTLYILDKNGYPMPKNKPGI
GELALGPVMFGASKTLLNGNHHDVYFKGMPTLNGEVLRRHGDIFELTSNG
YYHAHGRADDTMNIGGIKISSIEIERVCNEVDDRVFETTAIGVPPLGGGP
EQLVIFFVLKDSNDTTIDLNQLRLSENLGLQKKLNPLFKVTRVVPLSSLP
RTATNKIMRRVLRQFSHFE.

[0401] CsHCS2 has the sequence:

(SEQ ID NO: 6)
MEKSGYGRDGIYRSLRPPLHLPNNNNLSMVSFLERNSSSYPQKPALIDSE
TNQILSFSHFKSTVIKVSHGFLNLGIKKNDVVLIYAPNSIHFPVCFLGII
ASGAIATTSNPLYTVSELSKQVKDSNPKLIITVPQLLEKVKGFNLPTILI
GPDSEQESSSDKVMTENDLVNLGGSSGSEFPIVDDFKQSDTAALLYSSGT
TGMSKGVVLTHKNFIASSLMVTMEQDLVGEMDNVFLCFLPMFHVFGLAII
TYAQLQRGNTVISMARFDLEKMLKDVEKYKVTHLWVVPPVILALSKNSMV
KKFNLSSIKYIGSGAAPLGKDLMEECSKVVPYGIVAQGYGMTETCGIVSM
EDIRGGKRNSGSAGMLASGVEAQIVSVDTLKPLPPNQLGEIWVKGPNMMQ
GYFNNPQATKLTIDKKGWVHTGDLGYFDEDGHLYVVDRIKELIKYKGFQV
APAELEGLLVSHPEILDAVVIPFPDAEAGEVPVAYVVRSPNSSLTENDVK
KFIAGQVASFKRLRKVTFINSVPKSASGKILRRELIQKVRSNM.

### Polyketide Synthases (PKS)

[0402] A host cell described in this application may comprise a PKS. As used in this application, a “PKS” refers to an enzyme that is capable of producing a polyketide. In certain embodiments, a PKS converts a compound of Formula (2) to a compound of Formula (4), (5), and/or (6). In certain embodiments, a PKS converts a compound of Formula (2) to a compound of Formula (4). In certain embodiments, a PKS converts a compound of Formula (2) to a compound of Formula (5). In certain embodiments, a PKS converts a compound of Formula (2) to a compound of Formula (4) and/or (5). In certain embodiments, a PKS converts a compound of Formula (2) to a compound of Formula (5) and/or (6).

[0403] In some embodiments, a PKS is a tetraketide synthase (TKS). In certain embodiments, a PKS is an olivetol synthase (OLS). As used in this application, an “OLS” refers to an enzyme that is capable of using a substrate of Formula (2a) to form a compound of Formula (4a), (5a) or (6a) as shown in FIG. 1.

[0404] In certain embodiments, a PKS is a divarinic acid synthase (DVS).

[0405] In certain embodiments, polyketide synthases can use hexanoyl-CoA or any acyl-CoA (or a product of Formula (2):

[chemical structure]

and three malonyl-CoAs as substrates to form 3,5,7-trioxododecanoyl-CoA or other 3,5,7-trioxo-acyl-CoA derivatives; or to form a compound of Formula (4):

[chemical structure]

wherein R is hydrogen, optionally substituted acyl, optionally substituted alkyl, optionally substituted alkenyl, optionally substituted alkynyl, optionally substituted carbocyclyl, or optionally substituted aryl; depending on substrate. R is as defined in this application. In some embodiments, R is a C2-C6 optionally substituted alkyl. In some embodiments, R is a propyl or pentyl. In some embodiments, R is pentyl. In some embodiments, R is propyl. A PKS may also bind isovaleryl-CoA, octanoyl-CoA, hexanoyl-CoA, and butyryl-CoA. In some embodiments, a PKS is capable of catalyzing the formation of a 3,5,7-trioxoalkanoyl-CoA (e.g. 3,5,7-trioxododecanoyl-CoA). In some embodiments, an OLS is capable of catalyzing the formation of a 3,5,7-trioxoalkanoyl-CoA (e.g. 3,5,7-trioxododecanoyl-CoA).

[0406] In some embodiments, a PKS uses a substrate of Formula (2) to form a compound of Formula (4):

[chemical structure]

wherein R is unsubstituted pentyl.

[0407] As one of ordinary skill in the art would appreciate a PKS, such as an OLS, could be obtained from any source, including naturally occurring sources and synthetic sources (e.g., a non-naturally occurring PKS). In some embodiments a PKS is from Cannabis. In some embodiments a PKS is from Dictyostelium. Non-limiting examples of PKS enzymes may be found in U.S. Pat. No. 6,265,633; PCT Publication No. WO2018/148848 A1; PCT Publication No. WO2018/148849 A1: and U.S. Patent Publication No. 2018/155748, and WO 2020/176547, which are incorporated by reference in this application in their entireties.

[0408] A non-limiting example of an OLS is provided by UniProtKB—B1Q2B6 from C. sativa. In C. sativa, this OLS uses hexanoyl-CoA and malonyl-CoA as substrates to form 3,5,7-trioxododecanoyl-CoA. OLS (e.g., UniProtKB—B1Q2B6) in combination with olivetolic acid cyclase (OAC) produces olivetolic acid (OA) in C. sativa.

[0409] The amino acid sequence of UniProtKB—B1Q2B6 is:

(SEQ ID NO: 7)
MNHLRAEGPASVLAIGTANPENILLQDEFPDYYFRVTKSEHMTQLKEKFR
KICDKSMIRKRNCFLNEEHLKQNPRLVEHEMQTLDARQDMLVVEVPKLGK
DACAKAIKEWGQPKSKITHLIFTSASTTDMPGADYHCAKLLGLSPSVKRV
MMYQLGCYGGGTVLRIAKDIAENNKGARVLAVCCDIMACLFRGPSESDLE
LLVGQAIFGDGAAAVIVGAEPDESVGERPIFELVSTGQTILPNSEGTIGG
HIREAGLIFDLHKDVPMLISNNIEKCLIEAFTPIGISDWNSIFWITHPGG
KAILDKVEEKLHLKSDKFVDSRHVLSEHGNMSSSTVLFVMDELRKRSLEE
GKSTTGDGFEWGVLFGFGPGLTVERVVVRSVPIKY.

[0410] PKS enzymes described in this application may or may not have cyclase activity. In some embodiments where the PKS enzyme does not have cyclase activity, one or more exogenous polynucleotides that encode a polyketide cyclase (PKC) enzyme may also be co-expressed in the same host cells to enable conversion of hexanoic acid or butyric acid or other fatty acid conversion into olivetolic acid or divarinolic acid or other precursors of cannabinoids. In some embodiments, the PKS enzyme and a PKC enzyme are expressed as separate distinct enzymes. In some embodiments, a PKS enzyme that lacks cyclase activity and a PKC are linked as part of a fusion polypeptide that is a bifunctional PKS. In some embodiments, a bifunctional PKC is referred to as a bifunctional PKS-PKC. In some embodiments, a bifunctional PKC is a bifunctional tetraketide synthase (TKS-TKC). As used in this application, a bifunctional PKS is an enzyme that is capable of producing a compound of Formula (6):

[chemical structure]

from a compound of Formula (2):

[chemical structure]

and a compound of Formula (3):

[chemical structure]

In some embodiments, a PKS produces more of a compound of Formula (6):

[chemical structure]

as compared to a compound of Formula (5):

[chemical structure]

As a non-limiting example, a compound of Formula (6):

[chemical structure]

is olivetolic acid (Formula (6a)):

[chemical structure]

As a non-limiting example, a compound of Formula (5):

[chemical structure]

is olivetol (Formula (5a)):

[chemical structure]

[0411] In some embodiments, a polyketide synthase of the present disclosure is capable of catalyzing a compound of Formula (2):

[chemical structure]

and a compound of Formula (3):

[chemical structure]

to produce a compound of Formula (4):

[chemical structure]

and also further catalyzes a compound of Formula (4):

[chemical structure]

to produce a compound of Formula (6):

[chemical structure]

In some embodiments, the PKS is not a fusion protein. In some embodiments, a PKS that is capable of catalyzing a compound of Formula (2):

[chemical structure]

and a compound of Formula (3):

[chemical structure]

to produce a compound of Formula (4):

[chemical structure]

and is also capable of further catalyzing the production of a compound of Formula (6):

[chemical structure]

from the compound of Formula (4):

[chemical structure]

is preferred because it avoids the need for an additional polyketide cyclase to produce a compound of Formula (6):

[chemical structure]

In some embodiments, such an enzyme that is a bifunctional PKS eliminates the transport considerations needed with addition of a polyketide cyclase, whereby the compound of Formula (4), being the product of the PKS, must be transported to the PKS for use as a substrate to be converted into the compound of Formula (6).

[0412] In some embodiments, a PKS is capable of producing olivetolic acid in the presence of a compound of Formula (2a):

[chemical structure]

### and Formula (3a):

[chemical structure]

[0414] In some embodiments, an OLS is capable of producing olivetolic acid in the presence of a compound of Formula (2a):

[chemical structure]

### and Formula (3a):

[chemical structure]

### Polyketide Cyclase (PKC)

[0416] A host cell described in this disclosure may comprise a PKC. As used in this application, a “PKC” refers to an enzyme that is capable of cyclizing a polyketide.

[0417] In certain embodiments, a polyketide cyclase (PKC) catalyzes the cyclization of an oxo fatty acyl-CoA (e.g., a compound of Formula (4):

[chemical structure]

[0418] or 3,5,7-trioxododecanoyl-COA, 3,5,7-trioxodecanoyl-COA) to the corresponding intramolecular cyclization product (e.g., compound of Formula (6), including olivetolic acid and divarinic acid). In some embodiments, a PKC catalyzes the formation of a compound which occurs in the presence of a PKS. PKC substrates include trioxoalkanol-CoA, such as 3,5,7-Trioxododecanoyl-CoA, or a compound of Formula (4):

[chemical structure]

wherein R is hydrogen, optionally substituted acyl, optionally substituted alkyl, optionally substituted alkenyl, optionally substituted alkynyl, optionally substituted carbocyclyl, or optionally substituted aryl. In certain embodiments, a PKC catalyzes a compound of Formula (4):

[chemical structure]

wherein R is hydrogen, optionally substituted acyl, optionally substituted alkyl, optionally substituted alkenyl, optionally substituted alkynyl, optionally substituted carbocyclyl, or optionally substituted aryl; to form a compound of Formula (6):

[chemical structure]

wherein R is hydrogen, optionally substituted acyl, optionally substituted alkyl, optionally substituted alkenyl, optionally substituted alkynyl, optionally substituted carbocyclyl, or optionally substituted aryl; as substrates. R is as defined in this application. In some embodiments, R is a C2-C6 optionally substituted alkyl. In some embodiments, R is a propyl or pentyl. In some embodiments, R is pentyl. In some embodiments, R is propyl. In certain embodiments, a PKC is an olivetolic acid cyclase (OAC). In certain embodiments, a PKC is a divarinic acid cyclase (DAC).

[0419] As one of ordinary skill in the art would appreciate a PKC could be obtained from any source, including naturally occurring sources and synthetic sources (e.g., a non-naturally occurring PKC). In some embodiments, a PKC is from Cannabis. Non-limiting examples of PKCs include those disclosed in U.S. Pat. Nos. 9,611,460; 10,059,971; U.S. Patent Publication No. 2019/0169661, and PCT Application No. PCT/US21/37954, which are incorporated by reference in this application in their entireties.

[0420] In some embodiments, a PKC is an OAC. As used in this application, an “OAC” refers to an enzyme that is capable of catalyzing the formation of olivetolic acid (OA). In some embodiments, an OAC is an enzyme that is capable of using a substrate of Formula (4a)(3,5,7-trioxododecanoyl-CoA):

[chemical structure]

to form a compound of Formula (6a) (olivetolic acid):

[chemical structure]

[0421] Olivetolic acid cyclase from C. sativa (CsOAC) is a 101 amino acid enzyme that performs non-decarboxylative cyclization of the tetraketide product of olivetol synthase (FIG. 4 Structure 4a) via aldol condensation to form olivetolic acid (FIG. 4 Structure 6a). CsOAC was identified and characterized by Gagne et al. (PNAS 2012) via transcriptome mining, and its cyclization function was recapitulated in vitro to demonstrate that CsOAC is required for formation of olivetolic acid in C. sativa. A crystal structure of the enzyme was published by Yang et al. (FEBS J. 2016 March; 283(6):1088-106), which revealed that the enzyme is a homodimer and belongs to the α+β barrel (DABB) superfamily of protein folds. CsOAC is the only known plant polyketide cyclase. Multiple fungal Type III polyketide synthases have been identified that perform both polyketide synthase and cyclization functions (Funa et al., J Biol Chem. 2007 May 11; 282(19):14476-81); however, in plants such a dual function enzyme has not yet been discovered.

[0422] A non-limiting example of an amino acid sequence of an OAC in C. sativa is provided by UniProtKB—I6WU39 (SEQ ID NO: 1), which catalyzes the formation of olivetolic acid (OA) from 3,5,7-Trioxododecanoyl-CoA.

[0423] The sequence of UniProtKB—16WU39 (SEQ ID NO: 1) is:

MAVKHLIVLKFKDEITEAQKEEFFKTYVNLVNIIPAMKDVYWGKDVTQKN
KEEGYTHIVEVTFESVETIQDYIIHPAHVGFGDVYRSFWEKLLIFDYTPR
K.

[0424] A non-limiting example of a nucleic acid sequence encoding C. sativa OAC is:

(SEQ ID NO: 2)
atggcagtgaagcatttgattgtattgaagttcaaagatgaaatcacaga
agcccaaaaggaagaatttttcaagacgtatgtgaatcttgtgaatatca
tcccagccatgaaagatgtatactggggtaaagatgtgactcaaaagaat
aaggaagaagggtacactcacatagttgaggtaacatttgagagtgtgga
gactattcaggactacattattcatcctgcccatgttggatttggagatg
tctatcgttctttctgggaaaaacttctcatttttgactacacaccacga
aag.

### Prenyltransferase (PT)

[0425] A host cell described in this application may comprise a prenyltransferase (PT). As used in this application, a “PT” refers to an enzyme that is capable of transferring prenyl groups to acceptor molecule substrates. Non-limiting examples of prenyltransferases are described in in U.S. Pat. No. 7,544,498 and Kumano et al., Boorg Med Chem. 2008 Sep. 1; 16(17): 8117-8126 (e.g., NphB), PCT Publication No. WO2018/200888 (e.g., CsPT4), U.S. Pat. No. 8,884,100 (e.g., CsPT1); Canadian Patent No. CA2718469; Valliere et al., Nat Commun. 2019 Feb. 4; 10(1):565 (e.g., NphB variants); PCT Publication Nos: WO2019/173770, WO2019/183152, and WO2020/210810 (e.g., NphB variants); Luo et al., Nature 2019 March; 567(7746):123-126 (e.g., CsPT4); WO 2021/034848; U.S. 63/091,292 and U.S. 63/188,442 (e.g., CsPT variants and chimeras), which are incorporated by reference in their entireties. In some embodiments, a PT is capable of producing cannabigerolic acid (CBGA), cannabigerovarinic acid (CBGVA), or other cannabinoids or cannabinoid-like substances. In some embodiments, a PT is cannabigerolic acid synthase (CBGAS). In some embodiments, a PT is cannabigerovarinic acid synthase (CBGVAS).

[0426] In some embodiments, the PT is an NphB prenyltransferase. See, e.g., U.S. Pat. No. 7,544,498; and Kumano et al., Boorg Med Chem. 2008 Sep. 1; 16(17): 8117-8126, which are incorporated by reference in this application in their entireties. In some embodiments, a PT corresponds to NphB from Streptomyces sp. (see, e.g., UniprotKB Accession No. Q4R2T2; see also SEQ ID NO: 2 of U.S. Pat. No. 7,361,483). The protein sequence corresponding to UniprotKB Accession No. Q4R2T2 is provided by SEQ ID NO: 8:

(SEQ ID NO: 8)
MSEAADVERVYAAMEEAAGLLGVACARDKIYPLLSTFQDTLVEGGSVVVF
SMASGRHSTELDFSISVPTSHGDPYATVVEKGLFPATGHPVDDLLADTQK
HLPVSMFAIDGEVTGGFKKTYAFFPTDNMPGVAELSAIPSMPPAVAENAE
LFARYGLDKVQMTSMDYKKRQVNLYFSELSAQTLEAESVLALVRELGLHV
PNELGLKFCKRSFSVYPTLNWETGKIDRLCFAVISNDPTLVPSSDEGDIE
KFHNYATKAPYAYVGEKRTLVYGLTLSPKEEYYKLGAYYHITDVQRGLLK
AFDSLED.

[0427] A non-limiting example of a nucleic acid sequence encoding NphB is:

(SEQ ID NO: 9)
atgtcagaagccgcagatgtcgaaagagtttacgccgctatggaagaagc
cgccggtttgttaggtgttgcctgtgccagagataagatctacccattgt
tgtctacttttcaagatacattagttgaaggtggttcagttgttgttttc
tctatggcttcaggtagacattctacagaattggatttctctatctcagt
tccaacatcacatggtgatccatacgctactgttgttgaaaaaggtttat
ttccagcaacaggtcatccagttgatgatttgttggctgatactcaaaag
catttgccagtttctatgtttgcaattgatggtgaagttactggtggttt
caagaaaacttacgctttctttccaactgataacatgccaggtgttgcag
aattatctgctattccatcaatgccaccagctgttgcagaaaatgcagaa
ttatttgctagatacggtttggataaggttcaaatgacatctatggatta
caagaaaagacaagttaatttgtacttttctgaattatcagcacaaactt
tggaagctgaatcagttttggcattagttagagaattgggtttacatgtt
ccaaacgaattgggtttgaagttttgtaaaagatctttctcagtttatcc
aactttaaactgggaaacaggcaagatcgatagattatgtttcgcagtta
tctctaacgatccaacattggttccatcttcagatgaaggtgatatcgaa
aagtttcataactacgctactaaagcaccatatgcttacgttggtgaaaa
gagaacattagtttatggtttgactttatcaccaaaggaagaatactaca
agttgggtgcttactaccacattaccgacgtacaaagaggtttattgaaa
gcattcgatagtttagaagactaa.

[0428] In other embodiments, a PT corresponds to CsPT1, which is disclosed as SEQ ID NO:2 in U.S. Pat. No. 8,884,100 (C. sativa; corresponding to SEQ ID NO: 10 in this application):

(SEQ ID NO: 10)
MGLSSVCTFSFQTNYHTLLNPHNNNPKTSLLCYRHPKTPIKYSYNNFPSK
HCSTKSFHLQNKCSESLSIAKNSIRAATTNQTEPPESDNHSVATKILNFG
KACWKLQRPYTHIAFTSCACGLFGKELLHNTNLISWSLMFKAFFFLVAIL
CIASFTTTINQIYDLHIDRINKPDLPLASGEISVNTAWIMSIIVALFGLI
ITIKMKGGPLYIFGYCFGIFGGIVYSVPPFRWKQNPSTAFLLNFLAHIIT
NFTFYYASRAALGLPFELRPSFTFLLAFMKSMGSALALIKDASDVEGDTK
FGISTLASKYGSRNLTLFCSGIVLLSYVAAILAGIIWPQAFNSNVMLLSH
AILAFWLILQTRDFALTNYDPEAGRRFYEFMWKLYYAEYLVYVFI.

[0429] In some embodiments, a PT corresponds to CsPT4, which is disclosed as SEQ ID NO:1 in PCT Publication No. WO2019/071000, corresponding to SEQ ID NO: 11 in this application:

(SEQ ID NO: 11)
MGLSLVCTFSFQTNYHTLLNPHNKNPKNSLLSYQHPKTPIIKSSYDNFPS
KYCLTKNFHLLGLNSHNRISSQSRSIRAGSDQIEGSPHHESDNSIATKIL
NFGHTCWKLQRPYVVKGMISIACGLFGRELFNNRHLFSWGLMWKAFFALV
PILSFNFFAAIMNQIYDVDIDRINKPDLPLVSGEMSIETAWILSIIVALT
GLIVTIKLKSAPLFVFIYIFGIFAGFAYSVPPIRWKQYPFTNFLITISSH
VGLAFTSYSATTSALGLPFVWRPAFSFIIAFMTVMGMTIAFAKDISDIEG
DAKYGVSTVATKLGARNMTFVVSGVLLLNYLVSISIGIIWPQVFKSNIMI
LSHAILAFCLIFQTRELALANYASAPSRQFFEFIWLLYYAEYFVYVFI.

[0430] In some embodiments, a PT corresponds to a truncated CsPT4, which is provided as SEQ ID NO: 12:

MSAGSDQIEGSPHHESDNSIATKILNFGHTCWKLQRPYVVKGMISIACGL
FGRELFNNRHLFSWGLMWKAFFALVPILSFNFFAAIMNQIYDVDIDRINK
PDLPLVSGEMSIETAWILSIIVALTGLIVTIKLKSAPLFVFIYIFGIFAG
FAYSVPPIRWKQYPFTNFLITISSHVGLAFTSYSATTSALGLPFVWRPAF
SFIIAFMTVMGMTIAFAKDISDIEGDAKYGVSTVATKLGARNMTFVVSGV
LLLNYLVSISIGIIWPQVFKSNIMILSHAILAFCLIFQTRELALANYASA
PSRQFFEFIWLLYYAEYFVYVFI.

[0431] Functional expression of paralog C. sativa CBGAS enzymes in S. cerevisiae and production of the major cannabinoid CBGA has been reported (U.S. Patent Publication No. 2012/0144523, and Luo et al., Nature 2019 March; 567(7746):123-126). Luo et al. reported the production of CBGA in S. cerevisiae by expressing a truncated version of a C. sativa CBGAS, CsPT4, with its native signal peptide removed. Without being bound by a particular theory, the integral-membrane nature of C. sativa CBGAS enzymes may render functional expression of C. sativa CBGAS enzymes in heterologous hosts challenging. Removal of transmembrane domain(s) or signal sequences or use of prenyltransferases that are not associated with the membrane and are not integral membrane proteins may facilitate increased interaction between the enzyme and available substrate, for example in the cellular cytosol and/or in organelles that may be targeted using peptides that confer localization.

[0432] In some embodiments, the PT is a soluble PT. In some embodiments, the PT is a cytosolic PT. In some embodiments, the PT is a secreted protein. In some embodiments, the PT is not a membrane-associated protein. In some embodiments, the PT is not an integral membrane protein. In some embodiments, the PT does not comprise a transmembrane domain or a predicted transmembrane. In some embodiments, the PT may be primarily detected in the cytosol (e.g., detected in the cytosol to a greater extent than detected associated with the cell membrane). In some embodiments, the PT is a protein from which one or more transmembrane domains have been removed and/or mutated (e.g., by truncation, deletions, substitutions, insertions, and/or additions) so that the PT localizes or is predicted to localize in the cytosol of the host cell, or to cytosolic organelles within the host cell, or, in the case of bacterial hosts, in the periplasm. In some embodiments, the PT is a protein from which one or more transmembrane domains have been removed or mutated (e.g., by truncation, deletions, substitutions, insertions, and/or additions) so that the PT has increased localization to the cytosol, organelles, or periplasm of the host cell, as compared to membrane localization.

[0433] Within the scope of the term “transmembrane domains” are predicted or putative transmembrane domains in addition to transmembrane domains that have been empirically determined. In general, transmembrane domains are characterized by a region of hydrophobicity that facilitates integration into the cell membrane. Methods of predicting whether a protein is a membrane protein or a membrane-associated protein are known in the art and may include, for example amino acid sequence analysis, hydropathy plots, and/or protein localization assays.

[0434] In some embodiments, the PT is a protein from which a signal sequence has been removed and/or mutated so that the PT is not directed to the cellular secretory pathway. In some embodiments, the PT is a protein from which a signal sequence has been removed and/or mutated so that the PT is localized to the cytosol or has increased localization to the cytosol (e.g., as compared to the secretory pathway).

[0435] In some embodiments, the PT is a secreted protein. In some embodiments, the PT contains a signal sequence.

[0436] In some embodiments, a PT is a fusion protein. For example, a PT may be fused to one or more genes in the metabolic pathway of a host cell. In certain embodiments, a PT may be fused to mutant forms of one or more genes in the metabolic pathway of a host cell.

[0437] In some embodiments, a PT described in this application transfers one or more prenyl groups to any of positions 1, 2, 3, 4, or 5 in a compound of Formula (6), shown below:

[chemical structure]

[0438] In some embodiments, the PT transfers a prenyl group to any of positions 1, 2, 3, 4, or 5 in a compound of Formula (6), shown below:

[chemical structure]

to form a compound of one or more of Formula (8w), Formula (8x), Formula (8′), Formula (8y), Formula (8z):

[chemical structure]

or a pharmaceutically acceptable salt, solvate, hydrate, polymorph, co-crystal, tautomer, stereoisomer, isotopically labeled derivative, or prodrug thereof, wherein a is 1, 2, 3, 4, 5, 6, 7, 8, 9, or 10.

### Variants

[0439] Aspects of the disclosure relate to nucleic acids encoding any of the polypeptides (e.g., AAE, PKS, PKC, PT, or TS) described in this application. In some embodiments, a nucleic acid encompassed by the disclosure is a nucleic acid that hybridizes under high or medium stringency conditions to a nucleic acid encoding an AAE, PKS, PKC, PT, or TS and is biologically active. For example, high stringency conditions of 0.2 to 1×SSC at 65° C. followed by a wash at 0.2×SSC at 65° C. can be used. In some embodiments, a nucleic acid encompassed by the disclosure is a nucleic acid that hybridizes under low stringency conditions to a nucleic acid encoding an AAE, PKS, PKC, PT, or TS and is biologically active. For example, low stringency conditions of 6×SSC at room temperature followed by a wash at 2×SSC at room temperature can be used. Other hybridization conditions include 3×SSC at 40 or 50° C., followed by a wash in 1 or 2×SSC at 20, 30, 40, 50, 60, or 65° C.

[0440] Hybridizations can be conducted in the presence of formaldehyde, e.g., 10%, 20%, 30% 40% or 50%, which further increases the stringency of hybridization. Theory and practice of nucleic acid hybridization is described, e.g., in S. Agrawal (ed.) Methods in Molecular Biology, volume 20; and Tijssen (1993) Laboratory Techniques in biochemistry and molecular biology-hybridization with nucleic acid probes, e.g., part I chapter 2 “Overview of principles of hybridization and the strategy of nucleic acid probe assays,” Elsevier, New York provide a basic guide to nucleic acid hybridization.

[0441] Variants of enzyme sequences described in this application (e.g., AAE, PKS, PKC, PT, or TS, including nucleic acid or amino acid sequences) are also encompassed by the present disclosure. A variant may share at least 5%, at least 10%, at least 15%, at least 20%, at least 25%, at least 30%, at least 35%, at least 40%, at least 45%, at least 50%, at least 55%, at least 60%, at least 65%, at least 70%, at least 71%, at least 72%, at least 73%, at least 74%, at least 75%, at least 76%, at least 77%, at least 78%, at least 79%, at least 80%, at least 81%, at least 82%, at least 83%, at least 84%, at least 85%, at least 86%, at least 87%, at least 88%, at least 89%, at least 90%, at least 91%, at least 92%, at least 93%, at least 94%, at least 95%, at least 96%, at least 97%, at least 98%, at least 99%, or 100% sequence identity with a reference sequence, including all values in between.

[0442] Unless otherwise noted, the term “sequence identity,” which is used interchangeably in this disclosure with the term “percent identity,” as known in the art, refers to a relationship between the sequences of two polypeptides or polynucleotides, as determined by sequence comparison (alignment). In some embodiments, sequence identity is determined across the entire length of a sequence (e.g., AAE, PKS, PKC, PT, or TS sequence). In some embodiments, sequence identity is determined over a region (e.g., a stretch of amino acids or nucleic acids, e.g., the sequence spanning an active site) of a sequence (e.g., AAE, PKS, PKC, PT, or TS sequence). For example, in some embodiments, sequence identity is determined over a region corresponding to at least 30%, at least 40%, at least 50%, at least 60%, at least 70%, at least 80%, at least 90%, at least 95%, or over 1⁰⁰% of the length of the reference sequence.

[0443] Identity measures the percent of identical matches between the smaller of two or more sequences with gap alignments (if any) addressed by a particular mathematical model, algorithm, or computer program.

[0444] Identity of related polypeptides or nucleic acid sequences can be readily calculated by any of the methods known to one of ordinary skill in the art. The percent identity of two sequences (e.g., nucleic acid or amino acid sequences) may, for example, be determined using the algorithm of Karlin and Altschul Proc. Natl. Acad. Sci. USA 87:2264-68, 1990, modified as in Karlin and Altschul Proc. Natl. Acad. Sci. USA 90:5873-77, 1993. Such an algorithm is incorporated into the NBLAST® and XBLAST® programs (version 2.0) of Altschul et al., J. Mol. Biol. 215:403-10, 1990. BLAST* protein searches can be performed, for example, with the XBLAST program, score=50, wordlength=3 to obtain amino acid sequences homologous to the proteins described in this application. Where gaps exist between two sequences, Gapped BLAST® can be utilized, for example, as described in Altschul el al., Nucleic Acids Res. 25(17):3389-3402, 1997. When utilizing BLAST® and Gapped BLAST® programs, the default parameters of the respective programs (e.g., XBLAST® and NBLAST®) can be used, or the parameters can be adjusted appropriately as would be understood by one of ordinary skill in the art.

[0445] Another local alignment technique which may be used, for example, is based on the Smith-Waterman algorithm (Smith, T. F. & Waterman, M. S. (1981) “Identification of common molecular subsequences.” J. Mol. Biol. 147:195-197). A general global alignment technique which may be used, for example, is the Needleman-Wunsch algorithm (Needleman, S. B. & Wunsch, C. D. (1970) “A general method applicable to the search for similarities in the amino acid sequences of two proteins.” J. Mol. Biol. 48:443-453), which is based on dynamic programming.

[0446] More recently, a Fast Optimal Global Sequence Alignment Algorithm (FOGSAA) was developed that purportedly produces global alignment of nucleic acid and amino acid sequences faster than other optimal global alignment methods, including the Needleman-Wunsch algorithm. In some embodiments, the identity of two polypeptides is determined by aligning the two amino acid sequences, calculating the number of identical amino acids, and dividing by the length of one of the amino acid sequences. In some embodiments, the identity of two nucleic acids is determined by aligning the two nucleotide sequences and calculating the number of identical nucleotide and dividing by the length of one of the nucleic acids.

[0447] For multiple sequence alignments, computer programs including Clustal Omega (Sievers el al., Mol Syst Biol. 2011 Oct. 11; 7:539) may be used.

[0448] In preferred embodiments, a sequence, including a nucleic acid or amino acid sequence, is found to have a specified percent identity to a reference sequence, such as a sequence disclosed in this application and/or recited in the claims when sequence identity is determined using the algorithm of Karlin and Altschul Proc. Natl. Acad. Sci. USA 87:2264-68, 1990, modified as in Karlin and Altschul Proc. Natl. Acad. Sci. USA 90:5873-77, 1993 (e.g., BLAST®, NBLAST®, XBLAST® or Gapped BLAST® programs, using default parameters of the respective programs).

[0449] In some embodiments, a sequence, including a nucleic acid or amino acid sequence, is found to have a specified percent identity to a reference sequence, such as a sequence disclosed in this application and/or recited in the claims when sequence identity is determined using the Smith-Waterman algorithm (Smith, T. F. & Waterman, M. S. (1981) “Identification of common molecular subsequences.” J. Mol. Biol. 147:195-197) or the Needleman-Wunsch algorithm (Needleman, S. B. & Wunsch, C. D. (1970) “A general method applicable to the search for similarities in the amino acid sequences of two proteins.” J. Mol. Biol. 48:443-453) using default parameters.

[0450] In some embodiments, a sequence, including a nucleic acid or amino acid sequence, is found to have a specified percent identity to a reference sequence, such as a sequence disclosed in this application and/or recited in the claims when sequence identity is determined using a Fast Optimal Global Sequence Alignment Algorithm (FOGSAA) using default parameters.

[0451] In some embodiments, a sequence, including a nucleic acid or amino acid sequence, is found to have a specified percent identity to a reference sequence, such as a sequence disclosed in this application and/or recited in the claims when sequence identity is determined using Clustal Omega (Sievers et al., Mol Syst Biol. 2011 Oct. 11; 7:539) using default parameters.

[0452] As used in this application, a residue (such as a nucleic acid residue or an amino acid residue) in sequence “X” is referred to as corresponding to a position or residue (such as a nucleic acid residue or an amino acid residue) “Z” in a different sequence “Y” when the residue in sequence “X” is at the counterpart position of “Z” in sequence “Y” when sequences X and Y are aligned using amino acid sequence alignment tools known in the art.

[0453] As used in this application, variant sequences may be homologous sequences. As used in this application, homologous sequences are sequences (e.g., nucleic acid or amino acid sequences) that share a certain percent identity (e.g., at least 5%, at least 100%, at least 15%, at least 20%, at least 25%, at least 30%, at least 35%, at least 40%, at least 45%, at least 50%, at least 55%, at least 60%, at least 65%, at least 70%, at least 71%, at least 72%, at least 73%, at least 74%, at least 75%, at least 76%, at least 77%, at least 78%, at least 79%, at least 80%, at least 81%, at least 82%, at least 83%, at least 84%, at least 85%, at least 86%, at least 87%, at least 88%, at least 89%, at least 90%, at least 91%, at least 92%, at least 93%, at least 94%, at least 95%, at least 96%, at least 97%, at least 98%, at least 99%, or 100% percent identity, including all values in between). Homologous sequences include but are not limited to paralogous or orthologous sequences. Paralogous sequences arise from duplication of a gene within a genome of a species, while orthologous sequences diverge after a speciation event.

[0454] In some embodiments, a polypeptide variant (e.g., AAE, PKS, PKC, PT, or TS enzyme variant) comprises a domain that shares a secondary structure (e.g., alpha helix, beta sheet) with a reference polypeptide (e.g., a reference AAE, PKS, PKC, PT, or TS enzyme). In some embodiments, a polypeptide variant (e.g., AAE, PKS, PKC, PT, or TS enzyme variant) shares a tertiary structure with a reference polypeptide (e.g., a reference AAE, PKS, PKC, PT, or TS enzyme). As a non-limiting example, a polypeptide variant (e.g., AAE, PKS, PKC, PT, or TS enzyme) may have low primary sequence identity (e.g., less than 80%, less than 75%, less than 70%, less than 65%, less than 60%, less than 55%, less than 50%, less than 45%, less than 40%, less than 35%, less than 30%, less than 25%, less than 20%, less than 15%, less than 10%, or less than 5% sequence identity) compared to a reference polypeptide, but share one or more secondary structures (e.g., including but not limited to loops, alpha helices, or beta sheets), or have the same tertiary structure as a reference polypeptide. For example, a loop may be located between a beta sheet and an alpha helix, between two alpha helices, or between two beta sheets. Homology modeling may be used to compare two or more tertiary structures.

[0455] Functional variants of the recombinant AAE, PKS, PKC, PT, or TS enzyme disclosed in this application are encompassed by the present disclosure. For example, functional variants may bind one or more of the same substrates or produce one or more of the same products. Functional variants may be identified using any method known in the art. For example, the algorithm of Karlin and Altschul Proc. Natl. Acad. Sci. USA 87:2264-68, 1990 described above may be used to identify homologous proteins with known functions.

[0456] Putative functional variants may also be identified by searching for polypeptides with functionally annotated domains. Databases including Pfam (Sonnhammer et al., Proteins. 1997 July; 28(3):405-20) may be used to identify polypeptides with a particular domain.

[0457] Homology modeling may also be used to identify amino acid residues that are amenable to mutation (e.g., substitution, deletion, and/or insertion) without affecting function. A non-limiting example of such a method may include use of position-specific scoring matrix (PSSM) and an energy minimization protocol.

[0458] Position-specific scoring matrix (PSSM) uses a position weight matrix to identify consensus sequences (e.g., motifs). PSSM can be conducted on nucleic acid or amino acid sequences. Sequences are aligned and the method takes into account the observed frequency of a particular residue (e.g., an amino acid or a nucleotide) at a particular position and the number of sequences analyzed. See, e.g., Stormo et al., Nucleic Acids Res. 1982 May 11; 10(9):2997-3011. The likelihood of observing a particular residue at a given position can be calculated. Without being bound by a particular theory, positions in sequences with high variability may be amenable to mutation (e.g., substitution, deletion, and/or insertion; e.g., PSSM score≥0) to produce functional homologs.

[0459] PSSM may be paired with calculation of a Rosetta energy function, which determines the difference between the wild-type and the single-point mutant. The Rosetta energy function calculates this difference as (ΔΔG_{calc}). With the Rosetta function, the bonding interactions between a mutated residue and the surrounding atoms are used to determine whether a mutation increases or decreases protein stability. For example, a mutation that is designated as favorable by the PSSM score (e.g. PSSM score≥0), can then be analyzed using the Rosetta energy function to determine the potential impact of the mutation on protein stability. Without being bound by a particular theory, potentially stabilizing amino acid mutations are desirable for protein engineering (e.g., production of functional homologs). In some embodiments, a potentially stabilizing amino acid mutation has a ΔΔG_{calc} value of less than −0.1 (e.g., less than −0.2, less than −0.3, less than −0.35, less than −0.4, less than −0.45, less than −0.5, less than −0.55, less than −0.6, less than −0.65, less than −0.7, less than −0.75, less than −0.8, less than −0.85, less than −0.9, less than −0.95, or less than −1.0) Rosetta energy units (R.e.u.). See, e.g., Goldenzweig et al., Mol Cell. 2016 Jul. 21; 63(2):337-346. Doi: 10.1016/j.molcel.2016.06.012.

[0460] In some embodiments, a coding sequence comprises an amino acid mutation at 1, 2, 3, 4, 5, 6, 7, 8, 9, 10, 11, 12, 13, 14, 15, 16, 17, 18, 19, 20, 21, 22, 23, 24, 25, 26, 27, 28, 29, 30, 31, 32, 33, 34, 35, 36, 37, 38, 39, 40, 41, 42, 43, 44, 45, 46, 47, 48, 49, 50, 51, 52, 53, 54, 55, 56, 57, 58, 59, 60, 61, 62, 63, 64, 65, 66, 67, 68, 69, 70, 71, 72, 73, 74, 75, 76, 77, 78, 79, 80, 81, 82, 83, 84, 85, 86, 87, 88, 89, 90, 91, 92, 93, 94, 95, 96, 97, 98, 99, 100 or more than 100 positions relative to a reference coding sequence. In some embodiments, the coding sequence comprises an amino acid mutation in 1, 2, 3, 4, 5, 6, 7, 8, 9, 10, 11, 12, 13, 14, 15, 16, 17, 18, 19, 20, 21, 22, 23, 24, 25, 26, 27, 28, 29, 30, 31, 32, 33, 34, 35, 36, 37, 38, 39, 40, 41, 42, 43, 44, 45, 46, 47, 48, 49, 50, 51, 52, 53, 54, 55, 56, 57, 58, 59, 60, 61, 62, 63, 64, 65, 66, 67, 68, 69, 70, 71, 72, 73, 74, 75, 76, 77, 78, 79, 80, 81, 82, 83, 84, 85, 86, 87, 88, 89, 90, 91, 92, 93, 94, 95, 96, 97, 98, 99, 100 or more codons of the coding sequence relative to a reference coding sequence. As will be understood by one of ordinary skill in the art, a mutation within a codon may or may not change the amino acid that is encoded by the codon due to degeneracy of the genetic code. In some embodiments, the one or more substitutions, insertions, or deletions in the coding sequence do not alter the amino acid sequence of the coding sequence relative to the amino acid sequence of a reference polypeptide.

[0461] In some embodiments, the one or more mutations in a coding sequence do alter the amino acid sequence of the corresponding polypeptide relative to the amino acid sequence of a reference polypeptide. In some embodiments, the one or more mutations alters the amino acid sequence of the polypeptide relative to the amino acid sequence of a reference polypeptide and alter (enhance or reduce) an activity of the polypeptide relative to the reference polypeptide.

[0462] The activity (e.g., specific activity) of any of the recombinant polypeptides described in this application (e.g., AAE, PKS, PKC, PT, or TS) may be measured using routine methods. As a non-limiting example, a recombinant polypeptide's activity may be determined by measuring its substrate specificity, product(s) produced, the concentration of product(s) produced, or any combination thereof. As used in this application, “specific activity” of a recombinant polypeptide refers to the amount (e.g., concentration) of a particular product produced for a given amount (e.g., concentration) of the recombinant polypeptide per unit time.

[0463] The skilled artisan will also realize that mutations in a coding sequence may result in conservative amino acid substitutions to provide functionally equivalent variants of the foregoing polypeptides, e.g., variants that retain the activities of the polypeptides. As used in this application, a “conservative amino acid substitution” refers to an amino acid substitution that does not alter the relative charge or size characteristics or functional activity of the protein in which the amino acid substitution is made.

[0464] In some instances, an amino acid is characterized by its R group (see, e.g., Table 3). For example, an amino acid may comprise a nonpolar aliphatic R group, a positively charged R group, a negatively charged R group, a nonpolar aromatic R group, or a polar uncharged R group. Non-limiting examples of an amino acid comprising a nonpolar aliphatic R group include alanine, glycine, valine, leucine, methionine, and isoleucine. Non-limiting examples of an amino acid comprising a positively charged R group includes lysine, arginine, and histidine. Non-limiting examples of an amino acid comprising a negatively charged R group include aspartate and glutamate. Non-limiting examples of an amino acid comprising a nonpolar, aromatic R group include phenylalanine, tyrosine, and tryptophan. Non-limiting examples of an amino acid comprising a polar uncharged R group include serine, threonine, cysteine, proline, asparagine, and glutamine.

[0465] Non-limiting examples of functionally equivalent variants of polypeptides may include conservative amino acid substitutions in the amino acid sequences of proteins disclosed in this application. As used in this application “conservative substitution” is used interchangeably with “conservative amino acid substitution” and refers to any one of the amino acid substitutions provided in Table 3.

[0466] In some embodiments, 1, 2, 3, 4, 5, 6, 7, 8, 9, 10, 11, 12, 13, 14, 15, 16, 17, 18, 19, 20 or more than 20 residues can be changed when preparing variant polypeptides. In some embodiments, amino acids are replaced by conservative amino acid substitutions.

TABLE 5
Conservative Amino Acid Substitutions

| Original | | Conservative Amino |
|---|---|---|
| Residue | R Group Type | Acid Substitutions |
| Ala | nonpolar aliphatic R group | Cys, Gly, Ser |
| Arg | positively charged R group | His, Lys |
| Asn | polar uncharged R group | Asp, Gln, Glu |
| Asp | negatively charged R group | Asn, Gln, Glu |
| Cys | polar uncharged R group | Ala, Ser |
| Gln | polar uncharged R group | Asn, Asp, Glu |
| Glu | negatively charged R group | Asn, Asp, Gln |
| Gly | nonpolar aliphatic R group | Ala, Ser |
| His | positively charged R group | Arg, Tyr, Trp |
| Ile | nonpolar aliphatic R group | Leu, Met, Val |
| Leu | nonpolar aliphatic R group | Ile, Met, Val |
| Lys | positively charged R group | Arg, His |
| Met | nonpolar aliphatic R group | Ile, Leu, Phe, Val |
| Pro | polar uncharged R group | |
| Phe | nonpolar aromatic R group | Met, Trp, Tyr |
| Ser | polar uncharged R group | Ala, Gly, Thr |
| Thr | polar uncharged R group | Ala, Asn, Ser |
| Trp | nonpolar aromatic R group | His, Phe, Tyr, Met |
| Tyr | nonpolar aromatic R group | His, Phe, Trp |
| Val | nonpolar aliphatic R group | Ile, Leu, Met, Thr |

[0467] Amino acid substitutions in the amino acid sequence of a polypeptide to produce a recombinant polypeptide (e.g., AAE, PKS, PKC, PT, or TS) variant having a desired property and/or activity can be made by alteration of the coding sequence of the polypeptide (e.g., AAE, PKS, PKC, PT, or TS). Similarly, conservative amino acid substitutions in the amino acid sequence of a polypeptide to produce functionally equivalent variants of the polypeptide typically are made by alteration of the coding sequence of the recombinant polypeptide (e.g., AAE, PKS, PKC, PT, or TS).

[0468] Mutations (e.g., substitutions, insertions, additions, or deletions) can be made in a nucleic acid sequence by a variety of methods known to one of ordinary skill in the art. For example, mutations (e.g., substitutions, insertions, additions, or deletions) can be made by PCR-directed mutation, site-directed mutagenesis according to the method of Kunkel (Kunkel, Proc. Nat. Acad. Sci. U.S.A. 82: 488-492, 1985), by chemical synthesis of a gene encoding a polypeptide, by CRISPR, or by insertions, such as insertion of a tag (e.g., a HIS tag or a GFP tag). Mutations can include, for example, substitutions, insertions, additions, deletions, and translocations, generated by any method known in the art. Methods for producing mutations may be found in in references such as Molecular Cloning: A Laboratory Manual, J. Sambrook, et al., eds., Fourth Edition, Cold Spring Harbor Laboratory Press, Cold Spring Harbor, New York, 2012, or Current Protocols in Molecular Biology, F. M. Ausubel, et al., eds., John Wiley & Sons, Inc., New York, 2010.

[0469] In some embodiments, methods for producing variants include circular permutation (Yu and Lutz, Trends Biotechnol. 2011 January; 29(1):18-25). In circular permutation, the linear primary sequence of a polypeptide can be circularized (e.g., by joining the N-terminal and C-terminal ends of the sequence) and the polypeptide can be severed (“broken”) at a different location. Thus, the linear primary sequence of the new polypeptide may have low sequence identity (e.g., less than 80%, less than 75%, less than 70%, less than 65%, less than 60%, less than 55%, less than 50%, less than 45%, less than 40%, less than 35%, less than 30%, less than 25%, less than 20%, less than 15%, less than 10%, less or less than 5%, including all values in between) as determined by linear sequence alignment methods (e.g., Clustal Omega or BLAST). Topological analysis of the two proteins, however, may reveal that the tertiary structure of the two polypeptides is similar or dissimilar. Without being bound by a particular theory, a variant polypeptide created through circular permutation of a reference polypeptide and with a similar tertiary structure as the reference polypeptide can share similar functional characteristics (e.g., enzymatic activity, enzyme kinetics, substrate specificity or product specificity). In some instances, circular permutation may alter the secondary structure, tertiary structure or quaternary structure and produce an enzyme with different functional characteristics (e.g., increased or decreased enzymatic activity, different substrate specificity, or different product specificity). See, e.g., Yu and Lutz, Trends Biotechnol. 2011 January; 29(1):18-25.

[0470] It should be appreciated that in a protein that has undergone circular permutation, the linear amino acid sequence of the protein would differ from a reference protein that has not undergone circular permutation. However, one of ordinary skill in the art would be able to determine which residues in the protein that has undergone circular permutation correspond to residues in the reference protein that has not undergone circular permutation by, for example, aligning the sequences and detecting conserved motifs, and/or by comparing the structures or predicted structures of the proteins, e.g., by homology modeling.

[0471] In some embodiments, an algorithm that determines the percent identity between a sequence of interest and a reference sequence described in this application accounts for the presence of circular permutation between the sequences. The presence of circular permutation may be detected using any method known in the art, including, for example, RASPODOM (Weiner et al., Bioinformatics. 2005 Apr. 1; 21(7):932-7). In some embodiments, the presence of circulation permutation is corrected for (e.g., the domains in at least one sequence are rearranged) prior to calculation of the percent identity between a sequence of interest and a sequence described in this application. The claims of this application should be understood to encompass sequences for which percent identity to a reference sequence is calculated after taking into account potential circular permutation of the sequence.

### Expression of Nucleic Acids in Host Cells

[0472] Aspects of the present disclosure relate to recombinant enzymes, functional modifications and variants thereof, as well as their uses. For example, the methods described in this application may be used to produce cannabinoids and/or cannabinoid precursors. The methods may comprise using a host cell comprising an enzyme disclosed in this application, cell lysate, isolated enzymes, or any combination thereof. Methods comprising recombinant expression of genes encoding an enzyme disclosed in this application in a host cell are encompassed by the present disclosure. In vitro methods comprising reacting one or more cannabinoid precursors or cannabinoids in a reaction mixture with an enzyme disclosed in this application are also encompassed by the present disclosure. In some embodiments, the enzyme is a TS.

[0473] A nucleic acid encoding any of the recombinant polypeptides (e.g., AAE, PKS, PKC, PT, or TS enzyme) described in this application may be incorporated into any appropriate vector through any method known in the art. For example, the vector may be an expression vector, including but not limited to a viral vector (e.g., a lentiviral, retroviral, adenoviral, or adeno-associated viral vector), any vector suitable for transient expression, any vector suitable for constitutive expression, or any vector suitable for inducible expression (e.g., a galactose-inducible or doxycycline-inducible vector).

[0474] A vector encoding any of the recombinant polypeptides (e.g., AAE, PKS, PKC, PT, or TS enzyme) described in this application may be introduced into a suitable host cell using any method known in the art. Non-limiting examples of yeast transformation protocols are described in Gietz et al., Yeast transformation can be conducted by the LiAc/SS Carrier DNA/PEG method. Methods Mol Biol. 2006; 313:107-20, which is hereby incorporated by reference in its entirety. Host cells may be cultured under any conditions suitable as would be understood by one of ordinary skill in the art. For example, any media, temperature, and incubation conditions known in the art may be used. For host cells carrying an inducible vector, cells may be cultured with an appropriate inducible agent to promote expression.

[0475] In some embodiments, a vector replicates autonomously in the cell. In some embodiments, a vector integrates into a chromosome within a cell. A vector can contain one or more endonuclease restriction sites that are cut by a restriction endonuclease to insert and ligate a nucleic acid containing a gene described in this application to produce a recombinant vector that is able to replicate in a cell. Vectors are typically composed of DNA, although RNA vectors are also available. Cloning vectors include, but are not limited to: plasmids, fosmids, phagemids, virus genomes and artificial chromosomes. As used in this application, the terms “expression vector” or “expression construct” refer to a nucleic acid construct, generated recombinantly or synthetically, with a series of specified nucleic acid elements that permit transcription of a particular nucleic acid in a host cell (e.g., microbe), such as a yeast cell. In some embodiments, the nucleic acid sequence of a gene described in this application is inserted into a cloning vector so that it is operably joined to regulatory sequences and, in some embodiments, expressed as an RNA transcript. In some embodiments, the vector contains one or more markers, such as a selectable marker as described in this application, to identify cells transformed or transfected with the recombinant vector. In some embodiments, a host cell has already been transformed with one or more vectors. In some embodiments, a host cell that has been transformed with one or more vectors is subsequently transformed with one or more vectors. In some embodiments, a host cell is transformed simultaneously with more than one vector. In some embodiments, a cell that has been transformed with a vector or an expression cassette incorporates all or part of the vector or expression cassette into its genome. In some embodiments, the nucleic acid sequence of a gene described in this application is recoded. Recoding may increase production of the gene product by at least 10%, at least 15%, at least 20%, at least 25%, at least 30%, at least 35%, at least 40%, at least 45%, at least 50%, at least 55%, at least 60%, at least 65%, at least 70%, at least 75%, at least 80%, at least 85%, at least 90%, at least 95%, or 100%, including all values in between) relative to a reference sequence that is not recoded.

[0476] In some embodiments, the nucleic acid encoding any of the proteins described in this application is under the control of regulatory sequences (e.g., enhancer sequences). In some embodiments, a nucleic acid is expressed under the control of a promoter. The promoter can be a native promoter, e.g., the promoter of the gene in its endogenous context, which provides normal regulation of expression of the gene. Alternatively, a promoter can be a promoter that is different from the native promoter of the gene, e.g., the promoter is different from the promoter of the gene in its endogenous context.

[0477] In some embodiments, the promoter is a eukaryotic promoter. Non-limiting examples of eukaryotic promoters include TDH3, PGK1, PKC1, PDC1, TEF1, TEF2, RPL18B, SSA1, TDH2, PYK1, TPI1, GAL1, GAL10, GAL7, GAL3, GAL2, MET3, MET25, HXT3, HXT7, ACT1, ADH1, ADH2, CUP1-1, ENO2, and SOD1, as would be known to one of ordinary skill in the art (see, e.g., Addgene website: blog.addgene.org/plasmids-101-the-promoter-region). In some embodiments, the promoter is a prokaryotic promoter (e.g., bacteriophage or bacterial promoter). Non-limiting examples of bacteriophage promoters include Pls1con, T3, T7, SP6, and PL. Non-limiting examples of bacterial promoters include Pbad, PmgrB, Ptrc2, Plac/ara, Ptac, and Pm.

[0478] In some embodiments, the promoter is an inducible promoter. As used in this application, an “inducible promoter” is a promoter controlled by the presence or absence of a molecule. This may be used, for example, to controllably induce the expression of an enzyme. In some embodiments, an inducible promoter linked to an enzyme may be used to regulate expression of the enzyme(s), for example to reduce cannabinoid production in certain scenarios (e.g., during transport of the genetically modified organism to satisfy regulatory restrictions in certain jurisdictions, or between jurisdictions, where cannabinoids may not be shipped). In some embodiments, an inducible promoter linked to an enzyme may be used to regulate expression of the enzyme(s), for example to reduce cannabinoid production in certain scenarios (e.g., during transport of the genetically modified organism to satisfy regulatory restrictions in certain jurisdictions, or between jurisdictions, where cannabinoids may not be shipped). Non-limiting examples of inducible promoters include chemically regulated promoters and physically regulated promoters. For chemically regulated promoters, the transcriptional activity can be regulated by one or more compounds, such as alcohol, tetracycline, galactose, a steroid, a metal, an amino acid, or other compounds. For physically regulated promoters, transcriptional activity can be regulated by a phenomenon such as light or temperature. Non-limiting examples of tetracycline-regulated promoters include anhydrotetracycline (aTc)-responsive promoters and other tetracycline-responsive promoter systems (e.g., a tetracycline repressor protein (tetR), a tetracycline operator sequence (tetO) and a tetracycline transactivator fusion protein (tTA)). Non-limiting examples of steroid-regulated promoters include promoters based on the rat glucocorticoid receptor, human estrogen receptor, moth ecdysone receptors, and promoters from the steroid/retinoid/thyroid receptor superfamily. Non-limiting examples of metal-regulated promoters include promoters derived from metallothionein (proteins that bind and sequester metal ions) genes. Non-limiting examples of pathogenesis-regulated promoters include promoters induced by salicylic acid, ethylene or benzothiadiazole (BTH). Non-limiting examples of temperature/heat-inducible promoters include heat shock promoters. Non-limiting examples of light-regulated promoters include light responsive promoters from plant cells. In certain embodiments, the inducible promoter is a galactose-inducible promoter. In some embodiments, the inducible promoter is induced by one or more physiological conditions (e.g., pH, temperature, radiation, osmotic pressure, saline gradients, cell surface binding, or concentration of one or more extrinsic or intrinsic inducing agents). Non-limiting examples of an extrinsic inducer or inducing agent include amino acids and amino acid analogs, saccharides and polysaccharides, nucleic acids, protein transcriptional activators and repressors, cytokines, toxins, petroleum-based compounds, metal containing compounds, salts, ions, enzyme substrate analogs, hormones or any combination.

[0479] In some embodiments, the promoter is a constitutive promoter. As used in this application, a “constitutive promoter” refers to an unregulated promoter that allows continuous transcription of a gene. Non-limiting examples of a constitutive promoter include TDH3, PGK1, PKC1, PDC1, TEF, TEF2, RPL18B, SSA1, TDH2, PYK1, TPI1, HXT3, HXT7, ACT1, ADH1, ADH2, ENO2, and SOD1.

[0480] Other inducible promoters or constitutive promoters, including synthetic promoters, that may be known to one of ordinary skill in the art are also contemplated.

[0481] The precise nature of the regulatory sequences needed for gene expression may vary between species or cell types, but generally include, as necessary, 5′ non-transcribed and 5′ non-translated sequences involved with the initiation of transcription and translation respectively, such as a TATA box, capping sequence, CAAT sequence, and the like. In particular, such 5′ non-transcribed regulatory sequences will include a promoter region which includes a promoter sequence for transcriptional control of the operably joined gene. Regulatory sequences may also include enhancer sequences or upstream activator sequences. The vectors disclosed may include 5′ leader or signal sequences. The regulatory sequence may also include a terminator sequence. In some embodiments, a terminator sequence marks the end of a gene in DNA during transcription. The choice and design of one or more appropriate vectors suitable for inducing expression of one or more genes described in this application in a heterologous organism is within the ability and discretion of one of ordinary skill in the art.

[0482] Expression vectors containing the necessary elements for expression are commercially available and known to one of ordinary skill in the art (see, e.g., Sambrook et al., Molecular Cloning: A Laboratory Manual, Fourth Edition, Cold Spring Harbor Laboratory Press, 2012).

### Host Cells

[0483] The disclosed cannabinoid biosynthetic methods and host cells are exemplified with S. cerevisiae, but are also applicable to other host cells, as would be understood by one of ordinary skill in the art.

[0484] Suitable host cells include, but are not limited to: yeast cells, bacterial cells, algal cells, plant cells, fungal cells, insect cells, and animal cells, including mammalian cells. In one illustrative embodiment, suitable host cells include E. coli (e.g., Shuffle™ competent E. coli available from New England BioLabs in Ipswich, Mass.).

[0485] Other suitable host cells of the present disclosure include microorganisms of the genus Corynebacterium. In some embodiments, preferred Corynebacterium strains/species include: C. efficiens, with the deposited type strain being DSM44549, C. glutamicum, with the deposited type strain being ATCC13032, and C. ammoniagenes, with the deposited type strain being ATCC6871. In some embodiments the preferred host cell of the present disclosure is C. glutamicum.

[0486] Suitable host cells of the genus Corynebacterium, in particular of the species Corynebacterium glutamicum, are in particular the known wild-type strains: Corynebacterium glutamicum ATCC13032, Corynebacterium acetoglutamicum ATCC15806, Corynebacterium acetoacidophilum ATCC13870, Corynebacterium melassecola ATCC17965, Corynebacterium thermoaminogenes FERM BP-1539, Brevibacterium flavum ATCC14067, Brevibacterium lactofermentum ATCC13869, and Brevibacterium divaricatum ATCC14020; and L-amino acid-producing mutants, or strains, prepared therefrom, such as, for example, the L-lysine-producing strains: Corynebacterium glutamicum FERM-P 1709, Brevibacterium flavum FERM-P 1708, Brevibacterium lactofermentum FERM-P 1712, Corynebacterium glutamicum FERM-P 6463, Corynebacterium glutamicum FERM-P 6464, Corynebacterium glutamicum DM58-1, Corynebacterium glutamicum DG52-5, Corynebacterium glutamicum DSM5714, and Corynebacterium glutamicum DSM12866.

[0487] Suitable yeast host cells include, but are not limited to: Candida, Hansenula, Saccharomyces, Schizosaccharomyces, Pichia, Kluyveromyces, and Yarrowia. In some embodiments, the yeast cell is Hansenula polymorpha, Saccharomyces cerevisiae, Saccaromyces carlsbergensis, Saccharomyces diastaticus, Saccharomyces norbensis, Saccharomyces kluyveri, Schizosaccharomyces pombe, Komagataella phaffii, formerly known as Pichia pastoris, Pichia finlandica, Pichia trehalophila, Pichia kodamae, Pichia membranaefaciens, Pichia opuntiae, Pichia thermotolerans, Pichia salictaria, Pichia quercuum, Pichia pijperi, Pichia stipitis, Pichia methanolica, Pichia angusta, Kluyveromyces lactis, Candida albicans, or Yarrowia lipolytica.

[0488] In some embodiments, the yeast strain is an industrial polyploid yeast strain. Other non-limiting examples of fungal cells include cells obtained from Aspergillus spp., Penicillium spp., Fusarium spp., Rhizopus spp., Acremonium spp., Neurospora spp., Sordaria spp., Magnaporthe spp., Allomyces spp., Ustilago spp., Botrytis spp., and Trichoderma spp.

[0489] In certain embodiments, the host cell is an algal cell such as, Chlamydomonas (e.g., C. Reinhardtii) and Phormidium (P. sp. ATCC29409).

[0490] In other embodiments, the host cell is a prokaryotic cell. Suitable prokaryotic cells include gram positive, gram negative, and gram-variable bacterial cells. The host cell may be a species of, but not limited to: Agrobacterium, Alicyclobacillus, Anabaena, Anacystis, Acinetobacter, Acidothermus, Arthrobacter, Azobacter, Bacillus, Bifidobacterium. Brevibacterium, Butyrivibrio, Buchnera, Campestris, Camplyobacter, Clostridium, Corynebacterium, Chromatium, Coprococcus, Escherichia. Enterococcus, Enterobacter, Erwinia, Fusobacterium, Faecalibacterium, Francisella, Flavohacterium, Geobacillus, Haemophilus, Helicobacter, Klebsiella, Lactobacillus, Lactococcus, Ilyobacter, Micrococcus, Microbacterium, Mesorhizobium, Methylobacterium, Methylobacterium, Mycobacterium, Neisseria, Pantoea, Pseudomonas, Prochlorococcus, Rhodobacter, Rhodopseudomonas, Rhodopseudomonas, Roseburia, Rhodospirillum, Rhodococcus, Scenedesmus, Streptomyces, Streptococcus, Synecoccus, Saccharomonospora, Saccharopolyspora, Staphylococcus, Serratia, Salmonella, Shigella, Thermoanaerobacterium, Tropheryma, Tularensis, Temecula, Thermosynechococcus, Thermococcus, Ureaplasma, Xanthomonas, Xylella, Yersinia, and Zymomonas.

[0491] In some embodiments, the bacterial host strain is an industrial strain. Numerous bacterial industrial strains are known and suitable for the methods and compositions described in this application.

[0492] In some embodiments, the bacterial host cell is of the Agrobacterium species (e.g., A. radiobacter, A. rhizogenes, A. rubi), the Arthrobacter species (e.g., A. aurescens, A. citreus, A. globformis, A. hydrocarboglutamicus, A. mysorens, A. nicotianae, A. paraffineus, A. protophonniae, A. roseoparaffinus, A. sulfureus, A. ureafaciens), the Bacillus species (e.g., B. thuringiensis, B. anthracis, B. megaterium, B. subtilis, B. lentus, B. circulars, B. pumilus, B. lautus, B. coagulans, B. brevis, B. firmus, B. alkaophius, B. licheniformis, B. clausii, B. stearothermophilus, B. halodurans and B. amyloliquefaciens. In particular embodiments, the host cell will be an industrial Bacillus strain including but not limited to B. subtilis, B. pumilus, B. licheniformis, B. megaterium, B. clausii, B. stearothermophilus and B. amyloliquefaciens. In some embodiments, the host cell will be an industrial Clostridium species (e.g., C. acetobutylicum, C. tetani E88, C. lituseburense, C. saccharobutylicum, C. perfringens, C. beijerinckii). In some embodiments, the host cell will be an industrial Corynebacterium species (e.g., C. glutamicum, C. acetoacidophilum). In some embodiments, the host cell will be an industrial Escherichia species (e.g., E. coli). In some embodiments, the host cell will be an industrial Erwinia species (e.g., E. uredovora, E. carotovora, E. ananas, E. herbicola, E. punctata, E. terreus). In some embodiments, the host cell will be an industrial Pantoea species (e.g., P. citrea, P. agglomerans). In some embodiments, the host cell will be an industrial Pseudomonas species, (e.g., P. putida, P. aeruginosa, P. mevalonii). In some embodiments, the host cell will be an industrial Streptococcus species (e.g., S. equisimiles, S. pyogenes, S. uberis). In some embodiments, the host cell will be an industrial Streptomyces species (e.g., S. ambofaciens, S. achromogenes, S. avermitilis, S. coelicolor, S. aureofaciens, S. aureus, S. fungicidicus, S. griseus, S. lividans). In some embodiments, the host cell will be an industrial Zymomonas species (e.g., Z. mobilis, Z. lipolytica), and the like.

[0493] The present disclosure is also suitable for use with a variety of animal cell types, including mammalian cells, for example, human (including 293, HeLa, WI38, PER.C6 and Bowes melanoma cells), mouse (including 3T3, NS0, NS1, Sp2/0), hamster (CHO, BHK), monkey (COS, FRhL, Vero), insect cells, for example fall armyworm (including Sf9 and Sf21), silkmoth (including BmN), cabbage looper (including BTI-Tn-5B1-4) and common fruit fly (including Schneider 2), and hybridoma cell lines.

[0494] In various embodiments, strains that may be used in the practice of the disclosure including both prokaryotic and eukaryotic strains, and are readily accessible to the public from a number of culture collections such as American Type Culture Collection (ATCC), Deutsche Sammlung von Mikroorganismen and Zellkulturen GmbH (DSM), Centraalbureau Voor Schimmelcultures (CBS), and Agricultural Research Service Patent Culture Collection, Northern Regional Research Center (NRRL). The present disclosure is also suitable for use with a variety of plant cell types. In some embodiments, the plant is of the Cannabis genus in the family Cannabaceae. In certain embodiments, the plant is of the species Cannabis sativa, Cannabis indica, or Cannabis ruderalis. In other embodiments, the plant is of the genus Nicotiana in the family Solanaceae. In certain embodiments, the plant is of the species Nicotiana rustica.

[0495] The term “cell,” as used in this application, may refer to a single cell or a population of cells, such as a population of cells belonging to the same cell line or strain. Use of the singular term “cell” should not be construed to refer explicitly to a single cell rather than a population of cells. The host cell may comprise genetic modifications relative to a wild-type counterpart. Reduction of gene expression and/or gene inactivation in a host cell may be achieved through any suitable method, including but not limited to, deletion of the gene, introduction of a point mutation into the gene, selective editing of the gene and/or truncation of the gene. For example, polymerase chain reaction (PCR)-based methods may be used (see, e.g., Gardner et al., Methods Mol Biol. 2014; 1205:45-78). As a non-limiting example, genes may be deleted through gene replacement (e.g., with a marker, including a selection marker). A gene may also be truncated through the use of a transposon system (see, e.g., Poussu et al., Nucleic Acids Res. 2005; 33(12): e104). A gene may also be edited through of the use of gene editing technologies known in the art, such as CRISPR-based technologies.

### Culturing of Host Cells

[0496] Any of the cells disclosed in this application can be cultured in media of any type (rich or minimal) and any composition prior to, during, and/or after contact and/or integration of a nucleic acid. The conditions of the culture or culturing process can be optimized through routine experimentation as would be understood by one of ordinary skill in the art. In some embodiments, the selected media is supplemented with various components. In some embodiments, the concentration and amount of a supplemental component is optimized. In some embodiments, other aspects of the media and growth conditions (e.g., pH, temperature, etc.) are optimized through routine experimentation. In some embodiments, the frequency that the media is supplemented with one or more supplemental components, and the amount of time that the cell is cultured, is optimized.

[0497] Culturing of the cells described in this application can be performed in culture vessels known and used in the art. In some embodiments, an aerated reaction vessel (e.g., a stirred tank reactor) is used to culture the cells. In some embodiments, a bioreactor or fermenter is used to culture the cell. Thus, in some embodiments, the cells are used in fermentation. As used in this application, the terms “bioreactor” and “fermenter” are interchangeably used and refer to an enclosure, or partial enclosure, in which a biological, biochemical and/or chemical reaction takes place that involves a living organism or part of a living organism. A “large-scale bioreactor” or “industrial-scale bioreactor” is a bioreactor that is used to generate a product on a commercial or quasi-commercial scale. Large scale bioreactors typically have volumes in the range of liters, hundreds of liters, thousands of liters, or more.

[0498] Non-limiting examples of bioreactors include: stirred tank fermenters, bioreactors agitated by rotating mixing devices, chemostats, bioreactors agitated by shaking devices, airlift fermenters, packed-bed reactors, fixed-bed reactors, fluidized bed bioreactors, bioreactors employing wave induced agitation, centrifugal bioreactors, roller bottles, and hollow fiber bioreactors, roller apparatuses (for example benchtop, cart-mounted, and/or automated varieties), vertically-stacked plates, spinner flasks, stirring or rocking flasks, shaken multi-well plates, MD bottles, T-flasks, Roux bottles, multiple-surface tissue culture propagators, modified fermenters, and coated beads (e.g., beads coated with serum proteins, nitrocellulose, or carboxymethyl cellulose to prevent cell attachment).

[0499] In some embodiments, the bioreactor includes a cell culture system where the cell (e.g., yeast cell) is in contact with moving liquids and/or gas bubbles. In some embodiments, the cell or cell culture is grown in suspension. In other embodiments, the cell or cell culture is attached to a solid phase carrier. Non-limiting examples of a carrier system includes microcarriers (e.g., polymer spheres, microbeads, and microdisks that can be porous or non-porous), cross-linked beads (e.g., dextran) charged with specific chemical groups (e.g., tertiary amine groups), 2D microcarriers including cells trapped in nonporous polymer fibers, 3D carriers (e.g., carrier fibers, hollow fibers, multicartridge reactors, and semi-permeable membranes that can comprising porous fibers), microcarriers having reduced ion exchange capacity, encapsulation cells, capillaries, and aggregates. In some embodiments, carriers are fabricated from materials such as dextran, gelatin, glass, or cellulose.

[0500] In some embodiments, industrial-scale processes are operated in continuous, semi-continuous or non-continuous modes. Non-limiting examples of operation modes are batch, fed batch, extended batch, repetitive batch, draw/fill, rotating-wall, spinning flask, and/or perfusion mode of operation. In some embodiments, a bioreactor allows continuous or semi-continuous replenishment of the substrate stock, for example a carbohydrate source and/or continuous or semi-continuous separation of the product, from the bioreactor.

[0501] In some embodiments, the bioreactor or fermenter includes a sensor and/or a control system to measure and/or adjust reaction parameters. Non-limiting examples of reaction parameters include biological parameters (e.g., growth rate, cell size, cell number, cell density, cell type, or cell state, etc.), chemical parameters (e.g., pH, redox-potential, concentration of reaction substrate and/or product, concentration of dissolved gases, such as oxygen concentration and CO₂ concentration, nutrient concentrations, metabolite concentrations, concentration of an oligopeptide, concentration of an amino acid, concentration of a vitamin, concentration of a hormone, concentration of an additive, serum concentration, ionic strength, concentration of an ion, relative humidity, molarity, osmolarity, concentration of other chemicals, for example buffering agents, adjuvants, or reaction by-products), physical/mechanical parameters (e.g., density, conductivity, degree of agitation, pressure, and flow rate, shear stress, shear rate, viscosity, color, turbidity, light absorption, mixing rate, conversion rate, as well as thermodynamic parameters, such as temperature, light intensity/quality, etc.). Sensors to measure the parameters described in this application are well known to one of ordinary skill in the relevant mechanical and electronic arts. Control systems to adjust the parameters in a bioreactor based on the inputs from a sensor described in this application are well known to one of ordinary skill in the art in bioreactor engineering.

[0502] In some embodiments, the method involves batch fermentation (e.g., shake flask fermentation). General considerations for batch fermentation (e.g., shake flask fermentation) include the level of oxygen and glucose. For example, batch fermentation (e.g., shake flask fermentation) may be oxygen and glucose limited, so in some embodiments, the capability of a strain to perform in a well-designed fed-batch fermentation is underestimated. Also, the final product (e.g., cannabinoid or cannabinoid precursor) may display some differences from the substrate in terms of solubility, toxicity, cellular accumulation and secretion and in some embodiments can have different fermentation kinetics.

[0503] In some embodiments, the cells of the present disclosure are adapted to produce cannabinoids or cannabinoid precursors in vivo. In some embodiments, the cells are adapted to secrete one or more enzymes for cannabinoid synthesis (e.g., AAE, PKS, PKC, PT, or TS). In some embodiments, the cells of the present disclosure are lysed, and the remaining lysates are recovered for subsequent use. In such embodiments, the secreted or lysed enzyme can catalyze reactions for the production of a cannabinoid or precursor by bioconversion in an in vitro or ex vivo process. In some embodiments, any and all conversions described in this application can be conducted chemically or enzymatically, in vitro or in vivo.

[0504] In some embodiments, the host cells of the present disclosure are adapted to produce cannabinoids or cannabinoid precursors in vivo. In some embodiments, the host cells are adapted to secrete one or more cannabinoid pathway substrates, intermediates, and/or terminal products (e.g., olivetol, THCA, THC, CBDA, CBD, CBGA, CBGVA, THCVA, CBDVA, CBCVA, or CBCA). In some embodiments, the host cells of the present disclosure are lysed, and the lysate is recovered for subsequent use. In such embodiments, the secreted substrates, intermediates, and/or terminal products may be recovered from the culture media.

### Purification and Further Processing

[0505] In some embodiments, any of the methods described in this application may include isolation and/or purification of the cannabinoids and/or cannabinoid precursors produced (e.g., produced in a bioreactor). For example, the isolation and/or purification can involve one or more of cell lysis, centrifugation, extraction, column chromatography, distillation, crystallization, and lyophilization.

[0506] The methods described in this application encompass production of any cannabinoid or cannabinoid precursor known in the art. Cannabinoids or cannabinoid precursors produced by any of the recombinant cells disclosed in this application or any of the in vitro methods described in this application may be identified and extracted using any method known in the art. Mass spectrometry (e.g., LC-MS, GC-MS) is a non-limiting example of a method for identification and may be used to extract a compound of interest.

[0507] In some embodiments, any of the methods described in this application further comprise decarboxylation of a cannabinoid or cannabinoid precursor. As a non-limiting example, the acid form of a cannabinoid or cannabinoid precursor may be heated (e.g., at least 90° C.) to decarboxylate the cannabinoid or cannabinoid precursor. See, e.g., U.S. Pat. Nos. 10,159,908, 10,143,706, 9,908,832 and 7,344,736. See also, e.g., Wang et al., Cannabis Cannabinoid Res. 2016; 1(1): 262-271.

### Compositions, Kits, and Administration

[0508] The present disclosure provides compositions, including pharmaceutical compositions, comprising a cannabinoid or a cannabinoid precursor, or pharmaceutically acceptable salt thereof, produced by any of the methods described in this application, and optionally a pharmaceutically acceptable excipient.

[0509] In certain embodiments, a cannabinoid or cannabinoid precursor described in this application is provided in an effective amount in a composition, such as a pharmaceutical composition. In certain embodiments, the effective amount is a therapeutically effective amount. In certain embodiments, the effective amount is a prophylactically effective amount.

[0510] Compositions, such as pharmaceutical compositions, described in this application can be prepared by any method known in the art. In general, such preparatory methods include bringing a compound described in this application (i.e., the “active ingredient”) into association with a carrier or excipient, and/or one or more other accessory ingredients, and then, if necessary and/or desirable, shaping, and/or packaging the product into a desired single- or multi-dose unit.

[0511] Pharmaceutical compositions can be prepared, packaged, and/or sold in bulk, as a single unit dose, and/or as a plurality of single unit doses. A “unit dose” is a discrete amount of the pharmaceutical composition comprising a predetermined amount of the active ingredient. The amount of the active ingredient is generally equal to the dosage of the active ingredient which would be administered to a subject and/or a convenient fraction of such a dosage, such as one-half or one-third of such a dosage.

[0512] Relative amounts of the active ingredient, the pharmaceutically acceptable excipient, and/or any additional ingredients in a pharmaceutical composition described in this application will vary, depending upon the identity, size, and/or condition of the subject treated and further depending upon the route by which the composition is to be administered. The composition may comprise between 0.1% and 100% (w/w) active ingredient.

[0513] Pharmaceutically acceptable excipients used in the manufacture of pharmaceutical compositions include inert diluents, dispersing and/or granulating agents, surface active agents and/or emulsifiers, disintegrating agents, binding agents, preservatives, buffering agents, lubricating agents, and/or oils. Excipients such as cocoa butter and suppository waxes, coloring agents, coating agents, sweetening, flavoring, and perfuming agents may also be present in the composition. Exemplary excipients include diluents, dispersing and/or granulating agents, surface active agents and/or emulsifiers, disintegrating agents, binding agents, preservatives, buffering agents, lubricating agents, and/or oils (e.g., synthetic oils, semi-synthetic oils) as disclosed in this application.

[0514] Exemplary diluents include calcium carbonate, sodium carbonate, calcium phosphate, dicalcium phosphate, calcium sulfate, calcium hydrogen phosphate, sodium phosphate lactose, sucrose, cellulose, microcrystalline cellulose, kaolin, mannitol, sorbitol, inositol, sodium chloride, dry starch, cornstarch, powdered sugar, and mixtures thereof.

[0515] Exemplary granulating and/or dispersing agents include potato starch, corn starch, tapioca starch, sodium starch glycolate, clays, alginic acid, guar gum, citrus pulp, agar, bentonite, cellulose, and wood products, natural sponge, cation-exchange resins, calcium carbonate, silicates, sodium carbonate, cross-linked poly(vinyl-pyrrolidone) (crospovidone), sodium carboxymethyl starch (sodium starch glycolate), carboxymethyl cellulose, cross-linked sodium carboxymethyl cellulose (croscarmellose), methylcellulose, pregelatinized starch (starch 1500), microcrystalline starch, water insoluble starch, calcium carboxymethyl cellulose, magnesium aluminum silicate (Veegum), sodium lauryl sulfate, quaternary ammonium compounds, and mixtures thereof.

[0516] Exemplary surface active agents and/or emulsifiers include natural emulsifiers (e.g., acacia, agar, alginic acid, sodium alginate, tragacanth, chondrux, cholesterol, xanthan, pectin, gelatin, egg yolk, casein, wool fat, cholesterol, wax, and lecithin), colloidal clays (e.g., bentonite (aluminum silicate) and Veegum (magnesium aluminum silicate)), long chain amino acid derivatives, high molecular weight alcohols (e.g., stearyl alcohol, cetyl alcohol, oleyl alcohol, triacetin monostearate, ethylene glycol distearate, glyceryl monostearate, and propylene glycol monostearate, polyvinyl alcohol), carbomers (e.g., carboxy polymethylene, polyacrylic acid, acrylic acid polymer, and carboxyvinyl polymer), carrageenan, cellulosic derivatives (e.g., carboxymethylcellulose sodium, powdered cellulose, hydroxymethyl cellulose, hydroxypropyl cellulose, hydroxypropyl methylcellulose, methylcellulose), sorbitan fatty acid esters (e.g., polyoxyethylene sorbitan monolaurate (Tween® 20), polyoxyethylene sorbitan (Tween® 60), polyoxyethylene sorbitan monooleate (Tween® 80), sorbitan monopalmitate (Span® 40), sorbitan monostearate (Span® 60), sorbitan tristearate (Span® 65), glyceryl monooleate, sorbitan monooleate (Span® 80), polyoxyethylene esters (e.g., polyoxyethylene monostearate (Myrj® 45), polyoxyethylene hydrogenated castor oil, polyethoxylated castor oil, polyoxymethylene stearate, and Solutol®), sucrose fatty acid esters, polyethylene glycol fatty acid esters (e.g., Cremophor®), polyoxyethylene ethers, (e.g., polyoxyethylene lauryl ether (Brij® 30)), poly(vinyl-pyrrolidone), diethylene glycol monolaurate, triethanolamine oleate, sodium oleate, potassium oleate, ethyl oleate, oleic acid, ethyl laurate, sodium lauryl sulfate, Pluronic® F-68, poloxamer P-188, cetrimonium bromide, cetylpyridinium chloride, benzalkonium chloride, docusate sodium, and/or mixtures thereof.

[0517] Exemplary binding agents include starch (e.g., cornstarch and starch paste), gelatin, sugars (e.g., sucrose, glucose, dextrose, dextrin, molasses, lactose, lactitol, mannitol, etc.), natural and synthetic gums (e.g., acacia, sodium alginate, extract of Irish moss, panwar gum, ghatti gum, mucilage of isapol husks, carboxymethylcellulose, methylcellulose, ethylcellulose, hydroxyethylcellulose, hydroxypropyl cellulose, hydroxypropyl methylcellulose, microcrystalline cellulose, cellulose acetate, poly(vinyl-pyrrolidone), magnesium aluminum silicate (Veegum®), and larch arabogalactan), alginates, polyethylene oxide, polyethylene glycol, inorganic calcium salts, silicic acid, polymethacrylates, waxes, water, alcohol, and/or mixtures thereof.

[0518] Exemplary preservatives include antioxidants, chelating agents, antimicrobial preservatives, antifungal preservatives, antiprotozoan preservatives, alcohol preservatives, acidic preservatives, and other preservatives. In certain embodiments, the preservative is an antioxidant. In other embodiments, the preservative is a chelating agent.

[0519] Exemplary antioxidants include alpha tocopherol, ascorbic acid, acorbyl palmitate, butylated hydroxyanisole, butylated hydroxytoluene, monothioglycerol, potassium metabisulfite, propionic acid, propyl gallate, sodium ascorbate, sodium bisulfite, sodium metabisulfite, and sodium sulfite.

[0520] Exemplary chelating agents include ethylenediaminetetraacetic acid (EDTA) and salts and hydrates thereof (e.g., sodium edetate, disodium edetate, trisodium edetate, calcium disodium edetate, dipotassium edetate, and the like), citric acid and salts and hydrates thereof (e.g., citric acid monohydrate), fumaric acid and salts and hydrates thereof, malic acid and salts and hydrates thereof, phosphoric acid and salts and hydrates thereof, and tartaric acid and salts and hydrates thereof. Exemplary antimicrobial preservatives include benzalkonium chloride, benzethonium chloride, benzyl alcohol, bronopol, cetrimide, cetylpyridinium chloride, chlorhexidine, chlorobutanol, chlorocresol, chloroxylenol, cresol, ethyl alcohol, glycerin, hexetidine, imidurea, phenol, phenoxyethanol, phenylethyl alcohol, phenylmercuric nitrate, propylene glycol, and thimerosal.

[0521] Exemplary antifungal preservatives include butyl paraben, methyl paraben, ethyl paraben, propyl paraben, benzoic acid, hydroxybenzoic acid, potassium benzoate, potassium sorbate, sodium benzoate, sodium propionate, and sorbic acid.

[0522] Exemplary alcohol preservatives include ethanol, polyethylene glycol, phenol, phenolic compounds, bisphenol, chlorobutanol, hydroxybenzoate, and phenylethyl alcohol.

[0523] Exemplary acidic preservatives include vitamin A, vitamin C, vitamin E, beta-carotene, citric acid, acetic acid, dehydroacetic acid, ascorbic acid, sorbic acid, and phytic acid.

[0524] Other preservatives include tocopherol, tocopherol acetate, deteroxime mesylate, cetrimide, butylated hydroxyanisol (BHA), butylated hydroxytoluened (BHT), ethylenediamine, sodium lauryl sulfate (SLS), sodium lauryl ether sulfate (SLES), sodium bisulfite, sodium metabisulfite, potassium sulfite, potassium metabisulfite, Glydant® Plus, Phenonip®, methylparaben, Germall® 115, Germaben® II, Neolone®, Kathon®, and Euxyl®.

[0525] Exemplary buffering agents include citrate buffer solutions, acetate buffer solutions, phosphate buffer solutions, ammonium chloride, calcium carbonate, calcium chloride, calcium citrate, calcium glubionate, calcium gluceptate, calcium gluconate, D-gluconic acid, calcium glycerophosphate, calcium lactate, propanoic acid, calcium levulinate, pentanoic acid, dibasic calcium phosphate, phosphoric acid, tribasic calcium phosphate, calcium hydroxide phosphate, potassium acetate, potassium chloride, potassium gluconate, potassium mixtures, dibasic potassium phosphate, monobasic potassium phosphate, potassium phosphate mixtures, sodium acetate, sodium bicarbonate, sodium chloride, sodium citrate, sodium lactate, dibasic sodium phosphate, monobasic sodium phosphate, sodium phosphate mixtures, tromethamine, magnesium hydroxide, aluminum hydroxide, alginic acid, pyrogen-free water, isotonic saline, Ringer's solution, ethyl alcohol, and mixtures thereof.

[0526] Exemplary lubricating agents include magnesium stearate, calcium stearate, stearic acid, silica, talc, malt, glyceryl behanate, hydrogenated vegetable oils, polyethylene glycol, sodium benzoate, sodium acetate, sodium chloride, leucine, magnesium lauryl sulfate, sodium lauryl sulfate, and mixtures thereof.

[0527] Exemplary natural oils include almond, apricot kernel, avocado, babassu, bergamot, black current seed, borage, cade, camomile, canola, caraway, carnauba, castor, cinnamon, cocoa butter, coconut, cod liver, coffee, corn, cotton seed, emu, eucalyptus, evening primrose, fish, flaxseed, geraniol, gourd, grape seed, hazel nut, hyssop, isopropyl myristate, jojoba, kukui nut, lavandin, lavender, lemon, litsea cubeba, macademia nut, mallow, mango seed, meadowfoam seed, mink, nutmeg, olive, orange, orange roughy, palm, palm kernel, peach kernel, peanut, poppy seed, pumpkin seed, rapeseed, rice bran, rosemary, safflower, sandalwood, sasquana, savoury, sea buckthorn, sesame, shea butter, silicone, soybean, sunflower, tea tree, thistle, tsubaki, vetiver, walnut, and wheat germ oils. Exemplary synthetic or semi-synthetic oils include, but are not limited to, butyl stearate, medium chain triglycerides (such as caprylic triglyceride and capric triglyceride), cyclomethicone, diethyl sebacate, dimethicone 360, isopropyl myristate, mineral oil, octyldodecanol, oleyl alcohol, silicone oil, and mixtures thereof. In certain embodiments, exemplary synthetic oils comprise medium chain triglycerides (such as caprylic triglyceride and capric triglyceride).

[0528] Liquid dosage forms for oral and parenteral administration include pharmaceutically acceptable emulsions, microemulsions, solutions, suspensions, syrups and elixirs. In addition to the active ingredients, the liquid dosage forms may comprise inert diluents commonly used in the art such as, for example, water or other solvents, solubilizing agents and emulsifiers such as ethyl alcohol, isopropyl alcohol, ethyl carbonate, ethyl acetate, benzyl alcohol, benzyl benzoate, propylene glycol, 1,3-butylene glycol, dimethylformamide, oils (e.g., cottonseed, groundnut, corn, germ, olive, castor, and sesame oils), glycerol, tetrahydrofurfuryl alcohol, polyethylene glycols and fatty acid esters of sorbitan, and mixtures thereof. Besides inert diluents, the oral compositions can include adjuvants such as wetting agents, emulsifying and suspending agents, sweetening, flavoring, and perfuming agents. In certain embodiments for parenteral administration, the conjugates described in this application are mixed with solubilizing agents such as Cremophor®, alcohols, oils, modified oils, glycols, polysorbates, cyclodextrins, polymers, and mixtures thereof.

[0529] Injectable preparations, for example, sterile injectable aqueous or oleaginous suspensions can be formulated according to the known art using suitable dispersing or wetting agents and suspending agents. The sterile injectable preparation can be a sterile injectable solution, suspension, or emulsion in a nontoxic parenterally acceptable diluent or solvent, for example, as a solution in 1,3-butanediol. Among the acceptable vehicles and solvents that can be employed are water, Ringer's solution, U.S.P., and isotonic sodium chloride solution. In addition, sterile, fixed oils are conventionally employed as a solvent or suspending medium. For this purpose, any bland fixed oil can be employed including synthetic mono- or di-glycerides. In addition, fatty acids such as oleic acid are used in the preparation of injectables.

[0530] The injectable formulations can be sterilized, for example, by filtration through a bacterial-retaining filter, or by incorporating sterilizing agents in the form of sterile solid compositions which can be dissolved or dispersed in sterile water or other sterile injectable medium prior to use.

[0531] In order to prolong the effect of a drug, it is often desirable to slow the absorption of the drug from subcutaneous or intramuscular injection. This can be accomplished by the use of a liquid suspension of crystalline or amorphous material with poor water solubility. The rate of absorption of the drug then depends upon its rate of dissolution, which, in turn, may depend upon crystal size and crystalline form. Alternatively, delayed absorption of a parenterally administered drug form may be accomplished by dissolving or suspending the drug in an oil vehicle.

[0532] Compositions for rectal or vaginal administration are typically suppositories which can be prepared by mixing the conjugates described in this application with suitable non-irritating excipients or carriers such as cocoa butter, polyethylene glycol, or a suppository wax which are solid at ambient temperature but liquid at body temperature and therefore melt in the rectum or vaginal cavity and release the active ingredient.

[0533] Solid dosage forms for oral administration include capsules, tablets, pills, powders, and granules. In such solid dosage forms, the active ingredient is mixed with at least one inert, pharmaceutically acceptable excipient or carrier such as sodium citrate or dicalcium phosphate and/or (a) fillers or extenders such as starches, lactose, sucrose, glucose, mannitol, and silicic acid, (b) binders such as, for example, carboxymethylcellulose, alginates, gelatin, polyvinylpyrrolidinone, sucrose, and acacia, (c) humectants such as glycerol, (d) disintegrating agents such as agar, calcium carbonate, potato or tapioca starch, alginic acid, certain silicates, and sodium carbonate, (e) solution retarding agents such as paraffin, (f) absorption accelerators such as quaternary ammonium compounds, (g) wetting agents such as, for example, cetyl alcohol and glycerol monostearate, (h) absorbents such as kaolin and bentonite clay, and (i) lubricants such as talc, calcium stearate, magnesium stearate, solid polyethylene glycols, sodium lauryl sulfate, and mixtures thereof. In the case of capsules, tablets, and pills, the dosage form may include a buffering agent.

[0534] Solid compositions of a similar type can be employed as fillers in soft and hard-filled gelatin capsules using such excipients as lactose or milk sugar as well as high molecular weight polyethylene glycols and the like. The solid dosage forms of tablets, dragées, capsules, pills, and granules can be prepared with coatings and shells such as enteric coatings and other coatings well known in the art of pharmacology. They may optionally comprise opacifying agents and can be of a composition that they release the active ingredient(s) only, or preferentially, in a certain part of the intestinal tract, optionally, in a delayed manner. Examples of encapsulating compositions which can be used include polymeric substances and waxes. Solid compositions of a similar type can be employed as fillers in soft and hard-filled gelatin capsules using such excipients as lactose or milk sugar as well as high molecular weight polethylene glycols and the like.

[0535] The active ingredient can be in a micro-encapsulated form with one or more excipients as noted above. The solid dosage forms of tablets, dragées, capsules, pills, and granules can be prepared with coatings and shells such as enteric coatings, release controlling coatings, and other coatings well known in the pharmaceutical formulating art. In such solid dosage forms the active ingredient can be admixed with at least one inert diluent such as sucrose, lactose, or starch. Such dosage forms may comprise, as is normal practice, additional substances other than inert diluents, e.g., tableting lubricants and other tableting aids such a magnesium stearate and microcrystalline cellulose. In the case of capsules, tablets and pills, the dosage forms may comprise buffering agents. They may optionally comprise opacifying agents and can be of a composition that they release the active ingredient(s) only, or preferentially, in a certain part of the intestinal tract, optionally, in a delayed manner. Examples of encapsulating agents which can be used include polymeric substances and waxes.

[0536] Dosage forms for topical and/or transdermal administration of a compound described in this application may include ointments, pastes, creams, lotions, gels, powders, solutions, sprays, inhalants, and/or patches. Generally, the active ingredient is admixed under sterile conditions with a pharmaceutically acceptable carrier or excipient and/or any needed preservatives and/or buffers as can be required. Additionally, the present disclosure contemplates the use of transdermal patches, which often have the added advantage of providing controlled delivery of an active ingredient to the body. Such dosage forms can be prepared, for example, by dissolving and/or dispensing the active ingredient in the proper medium. Alternatively or additionally, the rate can be controlled by either providing a rate controlling membrane and/or by dispersing the active ingredient in a polymer matrix and/or gel.

[0537] Suitable devices for use in delivering intradermal pharmaceutical compositions described in this application include short needle devices. Intradermal compositions can be administered by devices which limit the effective penetration length of a needle into the skin. Alternatively or additionally, conventional syringes can be used in the classical mantoux method of intradermal administration. Jet injection devices which deliver liquid formulations to the dermis via a liquid jet injector and/or via a needle which pierces the stratum corneum and produces a jet which reaches the dermis are suitable. Ballistic powder/particle delivery devices which use compressed gas to accelerate the compound in powder form through the outer layers of the skin to the dermis are suitable.

[0538] Formulations suitable for topical administration include, but are not limited to, liquid and/or semi-liquid preparations such as liniments, lotions, oil-in-water and/or water-in-oil emulsions such as creams, ointments, and/or pastes, and/or solutions and/or suspensions. Topically administrable formulations may, for example, comprise from about 1% to about 10% (w/w) active ingredient, although the concentration of the active ingredient can be as high as the solubility limit of the active ingredient in the solvent. Formulations for topical administration may further comprise one or more of the additional ingredients described in this application.

[0539] A pharmaceutical composition described in this application can be prepared, packaged, and/or sold in a formulation suitable for pulmonary administration via the buccal cavity. Such a formulation may comprise dry particles which comprise the active ingredient and which have a diameter in the range from about 0.5 to about 7 nanometers, or from about 1 to about 6 nanometers. Such compositions are conveniently in the form of dry powders for administration using a device comprising a dry powder reservoir to which a stream of propellant can be directed to disperse the powder and/or using a self-propelling solvent/powder dispensing container such as a device comprising the active ingredient dissolved and/or suspended in a low-boiling propellant in a sealed container. Such powders comprise particles wherein at least 98% of the particles by weight have a diameter greater than 0.5 nanometers and at least 95% of the particles by number have a diameter less than 7 nanometers. Alternatively, at least 95% of the particles by weight have a diameter greater than 1 nanometer and at least 90% of the particles by number have a diameter less than 6 nanometers. Dry powder compositions may include a solid fine powder diluent such as sugar and are conveniently provided in a unit dose form.

[0540] Low boiling propellants generally include liquid propellants having a boiling point of below 65° F. at atmospheric pressure. Generally, the propellant may constitute 50 to 99.9% (w/w) of the composition, and the active ingredient may constitute 0.1 to 20% (w/w) of the composition. The propellant may further comprise additional ingredients such as a liquid non-ionic and/or solid anionic surfactant and/or a solid diluent (which may have a particle size of the same order as particles comprising the active ingredient).

[0541] Although the descriptions of pharmaceutical compositions provided in this application are principally directed to pharmaceutical compositions which are suitable for administration to humans, it will be understood by the skilled artisan that such compositions are generally suitable for administration to animals of all sorts. Modification of pharmaceutical compositions suitable for administration to humans in order to render the compositions suitable for administration to various animals is well understood, and the ordinarily skilled veterinary pharmacologist can design and/or perform such modification with ordinary experimentation.

[0542] Compounds provided in this application are typically formulated in dosage unit form for ease of administration and uniformity of dosage. It will be understood, however, that the total daily usage of the compositions described in this application will be decided by a physician within the scope of sound medical judgment. The specific therapeutically effective dose level for any particular subject or organism will depend upon a variety of factors including the disease being treated and the severity of the disorder; the activity of the specific active ingredient employed; the specific composition employed; the age, body weight, general health, sex, and diet of the subject; the time of administration, route of administration, and rate of excretion of the specific active ingredient employed; the duration of the treatment; drugs used in combination or coincidental with the specific active ingredient employed; and like factors well known in the medical arts.

[0543] The compounds and compositions provided in this application can be administered by any route, including enteral (e.g., oral), parenteral, intravenous, intramuscular, intra-arterial, intramedullary, intrathecal, subcutaneous, intraventricular, transdermal, interdermal, rectal, intravaginal, intraperitoneal, topical (as by powders, ointments, creams, and/or drops), mucosal, nasal, bucal, sublingual; by intratracheal instillation, bronchial instillation, and/or inhalation; and/or as an oral spray, nasal spray, and/or aerosol. Specifically contemplated routes are oral administration, intravenous administration (e.g., systemic intravenous injection), regional administration via blood and/or lymph supply, and/or direct administration to an affected site. In general, the most appropriate route of administration will depend upon a variety of factors including the nature of the agent (e.g., its stability in the environment of the gastrointestinal tract), and/or the condition of the subject (e.g., whether the subject is able to tolerate oral administration).

[0544] In some embodiments, compounds or compositions disclosed in this application are formulated and/or administered in nanoparticles. Nanoparticles are particles in the nanoscale. In some embodiments, nanoparticles are less than 1 μm in diameter. In some embodiments, nanoparticles are between about 1 and 100 nm in diameter. Nanoparticles include organic nanoparticles, such as dendrimers, liposomes, or polymeric nanoparticles. Nanoparticles also include inorganic nanoparticles, such as fullerenes, quantum dots, and gold nanoparticles. Compositions may comprise an aggregate of nanoparticles. In some embodiments, the aggregate of nanoparticles is homogeneous, while in other embodiments the aggregate of nanoparticles is heterogeneous.

[0545] The exact amount of a compound required to achieve an effective amount will vary from subject to subject, depending, for example, on species, age, and general condition of a subject, severity of the side effects or disorder, identity of the particular compound, mode of administration, and the like. An effective amount may be included in a single dose (e.g., single oral dose) or multiple doses (e.g., multiple oral doses). In certain embodiments, when multiple doses are administered to a subject or applied to a tissue or cell, any two doses of the multiple doses include different or substantially the same amounts of a compound described in this application. In certain embodiments, when multiple doses are administered to a subject or applied to a tissue or cell, the frequency of administering the multiple doses to the subject or applying the multiple doses to the tissue or cell is three doses a day, two doses a day, one dose a day, one dose every other day, one dose every third day, one dose every week, one dose every two weeks, one dose every three weeks, or one dose every four weeks. In certain embodiments, the frequency of administering the multiple doses to the subject or applying the multiple doses to the tissue or cell is one dose per day. In certain embodiments, the frequency of administering the multiple doses to the subject or applying the multiple doses to the tissue or cell is two doses per day. In certain embodiments, the frequency of administering the multiple doses to the subject or applying the multiple doses to the tissue or cell is three doses per day. In certain embodiments, when multiple doses are administered to a subject or applied to a tissue or cell, the duration between the first dose and last dose of the multiple doses is one day, two days, four days, one week, two weeks, three weeks, one month, two months, three months, four months, six months, nine months, one year, two years, three years, four years, five years, seven years, ten years, fifteen years, twenty years, or the lifetime of the subject, tissue, or cell. In certain embodiments, the duration between the first dose and last dose of the multiple doses is three months, six months, or one year. In certain embodiments, the duration between the first dose and last dose of the multiple doses is the lifetime of the subject, tissue, or cell. In certain embodiments, a dose (e.g., a single dose, or any dose of multiple doses) described in this application includes independently between 0.1 μg and 1 μg, between 0.001 mg and 0.01 mg, between 0.01 mg and 0.1 mg, between 0.1 mg and 1 mg, between 1 mg and 3 mg, between 3 mg and 10 mg, between 10 mg and 30 mg, between 30 mg and 100 mg, between 100 mg and 300 mg, between 300 mg and 1,000 mg, or between 1 g and 10 g, inclusive, of a compound described in this application. In certain embodiments, a dose described in this application includes independently between 1 mg and 3 mg, inclusive, of a compound described in this application. In certain embodiments, a dose described in this application includes independently between 3 mg and 10 mg, inclusive, of a compound described in this application. In certain embodiments, a dose described in this application includes independently between 10 mg and 30 mg, inclusive, of a compound described in this application. In certain embodiments, a dose described in this application includes independently between 30 mg and 100 mg, inclusive, of a compound described in this application.

[0546] Dose ranges as described in this application provide guidance for the administration of provided pharmaceutical compositions to an adult. The amount to be administered to, for example, a child or an adolescent can be determined by a medical practitioner or person skilled in the art and can be lower or the same as that administered to an adult.

[0547] A compound or composition, as described in this application, can be administered in combination with one or more additional pharmaceutical agents (e.g., therapeutically and/or prophylactically active agents). The compounds or compositions can be administered in combination with additional pharmaceutical agents that improve their activity, improve bioavailability, improve safety, reduce drug resistance, reduce and/or modify metabolism, inhibit excretion, and/or modify distribution in a subject or cell. It will also be appreciated that the therapy employed may achieve a desired effect for the same disorder, and/or it may achieve different effects. In certain embodiments, a pharmaceutical composition described in this application including a compound described in this application and an additional pharmaceutical agent shows a synergistic effect that is absent in a pharmaceutical composition including one of the compound and the additional pharmaceutical agent, but not both.

[0548] The compound or composition can be administered concurrently with, prior to, or subsequent to one or more additional pharmaceutical agents, which may be useful as, e.g., combination therapies. Pharmaceutical agents include therapeutically active agents. Pharmaceutical agents also include prophylactically active agents. Pharmaceutical agents include small organic molecules such as drug compounds (e.g., compounds approved for human or veterinary use by the U.S. Food and Drug Administration as provided in the Code of Federal Regulations (CFR)), peptides, proteins, carbohydrates, monosaccharides, oligosaccharides, polysaccharides, nucleoproteins, mucoproteins, lipoproteins, synthetic polypeptides or proteins, small molecules linked to proteins, glycoproteins, steroids, nucleic acids, DNAs, RNAs, nucleotides, nucleosides, oligonucleotides, antisense oligonucleotides, lipids, hormones, vitamins, and cells. In certain embodiments, the additional pharmaceutical agent is a pharmaceutical agent useful for treating and/or preventing a disease (e.g., proliferative disease, neurological disease, painful condition, psychiatric disorder, or metabolic disorder). Each additional pharmaceutical agent may be administered at a dose and/or on a time schedule determined for that pharmaceutical agent. The additional pharmaceutical agents may also be administered together with each other and/or with the compound or composition described in this application in a single dose or administered separately in different doses. The particular combination to employ in a regimen will take into account compatibility of the compound described in this application with the additional pharmaceutical agent(s) and/or the desired therapeutic and/or prophylactic effect to be achieved. In general, it is expected that the additional pharmaceutical agent(s) in combination be utilized at levels that do not exceed the levels at which they are utilized individually. In some embodiments, the levels utilized in combination will be lower than those utilized individually.

[0549] In some embodiments, one or more of the compositions described in this application are administered to a subject. In certain embodiments, the subject is an animal. The animal may be of either sex and may be at any stage of development. In certain embodiments, the subject is a human. In other embodiments, the subject is a non-human animal. In certain embodiments, the subject is a mammal. In certain embodiments, the subject is a non-human mammal. In certain embodiments, the subject is a domesticated animal, such as a dog, cat, cow, pig, horse, sheep, or goat. In certain embodiments, the subject is a companion animal, such as a dog or cat. In certain embodiments, the subject is a livestock animal, such as a cow, pig, horse, sheep, or goat. In certain embodiments, the subject is a zoo animal. In another embodiment, the subject is a research animal, such as a rodent (e.g., mouse, rat), dog, pig, or non-human primate.

[0550] Also encompassed by the disclosure are kits (e.g., pharmaceutical packs). The kits provided may comprise a composition, such as a pharmaceutical composition, or a compound described in this application and a container (e.g., a vial, ampule, bottle, syringe, and/or dispenser package, or other suitable container). In some embodiments, provided kits may optionally further include a second container comprising a pharmaceutical excipient for dilution or suspension of a pharmaceutical composition or compound described in this application. In some embodiments, the pharmaceutical composition or compound described in this application provided in the first container and the second container a combined to form one unit dosage form.

[0551] Thus, in one aspect, provided are kits including a first container comprising a compound or composition described in this application. In certain embodiments, the kits are useful for treating a disease in a subject in need thereof. In certain embodiments, the kits are useful for preventing a disease in a subject in need thereof. In certain embodiments, the kits are useful for reducing the risk of developing a disease in a subject in need thereof.

[0552] In certain embodiments, a kit described in this application further includes instructions for using the kit. A kit described in this application may also include information as required by a regulatory agency such as the U.S. Food and Drug Administration (FDA). In certain embodiments, the information included in the kits is prescribing information. In certain embodiments, the kits and instructions provide for treating a disease in a subject in need thereof. In certain embodiments, the kits and instructions provide for preventing a disease in a subject in need thereof. In certain embodiments, the kits and instructions provide for reducing the risk of developing a disease in a subject in need thereof. A kit described in this application may include one or more additional pharmaceutical agents described in this application as a separate composition.

[0553] In some embodiments, the compositions include consumer product, such as comestible, cosmetic, toiletry, potable, inhalable, and wellness products. Exemplary consumer products include salves, waxes, powdered concentrates, pastes, extracts, tinctures, powders, oils, capsules, skin patches, sublingual oral dose drops, mucous membrane oral spray doses, makeup, perfume, shampoos, cosmetic soaps, cosmetic creams, skin lotions, aromatic essential oils, massage oils, shaving preparations, oils for toiletry purposes, lip balm, cosmetic oils, facial washes, moisturizing creams, moisturizing body lotions, moisturizing face lotions, bath salts, bath gels, bath soaps in liquid form, shower gels, bath bombs, hair care preparations, shampoos, conditioner, chocolate bars, brownies, chocolates, cookies, crackers, cakes, cupcakes, puddings, honey, chocolate confections, frozen confections, fruit-based confectionery, sugar confectionery, gummy candies, dragées, pastries, cereal bars, chocolate, cereal based energy bars, candy, ice cream, tea-based beverages, coffee-based beverages, and herbal infusions.

[0554] The present invention is further illustrated by the following Examples, which in no way should be construed as limiting. The entire contents of all of the references (including literature references, issued patents, published patent applications, and co-pending patent applications) cited throughout this application are hereby expressly incorporated by reference. If a reference incorporated in this application contains a term whose definition is incongruous or incompatible with the definition of same term as defined in the present disclosure, the meaning ascribed to the term in this disclosure shall govern. However, mention of any reference, article, publication, patent, patent publication, and patent application cited in this application is not, and should not be taken as an acknowledgment or any form of suggestion that they constitute valid prior art or form part of the common general knowledge in any country in the world.

### EXAMPLES

### Example 1: Subcellular Targeting of Terminal Synthases

[0555] To identify intracellular locations within S. cerevisiae that would allow for proper folding and activity of expressed TS genes, a library of 29 strains expressing a C. sativa THCAS enzyme linked to a variety of N- and/or C-terminal signal peptides was designed to direct the THCAS enzymes to various subcellular compartments. Protein sequences were recoded in silico for expression in S. cerevisiae and synthesized in the integrative yeast expression vector shown in FIG. 5. Each enzyme expression construct was transformed into an S. cerevisiae CEN.PK strain that also expressed a prenyltransferase enzyme capable of catalyzing reaction R4 in FIG. 2. Information about library strains is provided in Table 7 and corresponding sequence information is provided in Table 20.

[0556] A tetrahydrocannabinolic acid (THCA) assay was conducted as follows: each thawed glycerol stock of THCAS transformants was stamped into a well of YEP+4% dextrose media. Samples were incubated at 30° C. and shaken in a shaking incubator for 2 days. A portion of each of the resulting cultures was stamped into a well of YEP+4% galactose+1 mM olivetolic acid (FIG. 1 Structure 6a). Samples were incubated at 20° C. and shaken in a shaking incubator for 4 days. Every 24 hours during those 4 days, 2% galactose and 1 mM olivetolic acid were spiked into the cultures. Sodium citrate buffer adjusted to pH 5.5 was added to each well at a final concentration of 100 mM. Samples were incubated at 20° C. and shaken in a shaking incubator for 2 days. A portion of each of the resulting production cultures was stamped into a well of phosphate buffered saline (PBS). Optical measurements were taken on a plate reader, with absorbance measured at 600 nm and fluorescence at 528 nm with 485 nm excitation. Samples were incubated at 30° C. and shaken in a shaking incubator for 2 days. 100% methanol was stamped into the production cultures in half-height deepwell plates. Plates were heat sealed and frozen. Samples were then thawed for 30 min and spun down at 4° C. A portion of the supernatant was stamped into half-area 96 well plates. THCA production in the samples was quantified in whole cell broth via LC-MS.

[0557] The library of THCAS expression constructs including N- and/or C-terminal signal peptides was assayed for activity in a screen using the assay described above. The THCAS expression constructs demonstrated measurable THCA production (FIG. 6). Strain IDs and their corresponding activities are shown in Table 6.

TABLE 6
THCA titers of THCAS expression constructs in S. cerevisiae

| | | | | Average | Standard |
|---|---|---|---|---|---|
| | Strain | N-terminal Signal Peptide/ | Predicted Target | THCA | Deviation |
| Strain | Type | C-terminal Sigal Peptide | Location | [μg/L] | THCA [μg/L] |
| 631185 | GFP | -/- | — | 0.00 | 0.00 |
| | negative | | | | |
| | control | | | | |
| 631188 | Library | -/HDEL | endoplasmic reticulum | 1153.70 | 271.06 |
| 631189 | Library | K. phaffii PEP4/- | Vacuole | 32647.87 | 5869.23 |
| 631190 | Library | Mfa2/HDEL | endoplasmic reticulum | 38533.71 | 11960.24 |
| 631191 | Library | YLR120C/HDEL | endoplasmic reticulum | 35162.01 | 6425.09 |
| 631192 | Library | YLR120C/KLD | Golgi | 35925.48 | 6164.50 |
| 631193 | Library | Mfa2/HDEL | endoplasmic reticulum | 40744.78 | 5687.94 |
| 631194 | Library | Mfa2/KLD | Golgi | 40394.58 | 1153.97 |
| 631195 | Library | Osm1p/HDEL | endoplasmic reticulum | 25031.34 | 3108.25 |
| 631196 | Library | Osm1p/KLD | Golgi | 17784.85 | 6412.46 |
| 631197 | Library | Sf leader/HDEL | endoplasmic reticulum | 45065.18 | 3937.30 |
| 631198 | Library | Sf leader/KLD | Golgi | 37305.08 | 6116.95 |
| 631199 | Library | Ost1_leader/HDEL | endoplasmic reticulum | 53925.15 | 7890.11 |
| 631200 | Library | Ost1_leader/KLD | Golgi | 36790.47 | 8661.71 |
| 631201 | Library | -/UBC6 | Cytosol | 1150.68 | 74.42 |
| 631202 | Library | -/PTS1 SKL | Peroxisome | 460.63 | 32.36 |
| 631203 | Library | -/CVIA from Mfa | Extracellular | 580.17 | 48.52 |
| 631204 | Library | YDR456W/- | Vacuole | 27670.08 | 2300.64 |
| 631205 | Library | YNL121C/- | Mitochondria | 1197.72 | 217.34 |
| 631206 | Library | YLR120C/- | plasma membrane | 41520.26 | 7025.15 |
| 631207 | Library | Mfa2/- | extracellular | 31574.55 | 8021.01 |
| 631208 | Library | Ost1 leader/- | endoplasmic reticulum | 37110.45 | 5192.99 |
| 631209 | Library | Sf leader/- | extracellular | 23732.83 | 6043.04 |
| 631210 | Library | OSM1-leader-T23L/- | mitochondria | 4951.01 | 1120.17 |
| 631211 | Library | ERG11-leader/- | endoplasmic reticulum | 0.00 | 0.00 |
| 631212 | Library | Osm1/- | mitochondria | 8341.30 | 920.72 |
| 631213 | Library | PRC1-11/- | vacuole | 6990.68 | 162.60 |
| 631214 | Library | PEP4 (short (1-24))/- | vacuole | 25111.88 | 6120.79 |
| 631215 | Library | PEP4 (long (2-76))/- | vacuole | 13885.96 | 1380.54 |
| 631216 | Library | Mfa2/- | extracellular | 36596.86 | 4670.46 |

[0558] Library strains comprising THCAS expression constructs with signal peptides that are expected to target the enzymes to organelles involved in the secretory pathway (e.g., the endoplasmic reticulum) were found to be critical for functional expression of the THCAS as measured by THCA production (FIG. 6 and Table 6). For example, strains t631199 and t631193 utilize the Ost1 leader sequence and the M4Falpha2 secretion tag, respectively, to target the THCAS to the secretory pathway. It is theorized that the THCAS harbored by both strains enters the endoplasmic reticulum as the starting point in the secretory pathway and is retained in that organelle via a HDEL endoplasmic reticulum retention tag. Without wishing to be bound by any theory, strains in which the signal peptides are expected to target the TSs to the secretory pathway may allow the TS to be exposed to subcellular environments beneficial for post-translational modifications (e.g., formation of a critical disulfide bridge in the oxidative environment of the endoplasmic reticulum and/or the addition of post-translational glycosylations in the endoplasmic reticulum and Golgi apparatus).

[0559] Strains in which the signal peptides are expected to target the TS to the plasma membrane also had functional expression. For example, strain t631206 harbored a THCAS N-terminally fused to the leader sequence of Ysp1 (UniProt Accession ID: P32329). The resulting enzyme is predicted to localize to the plasma membrane in a similar manner to Ysp1. Transport to the plasma membrane is mediated by the secretory machinery of S. cerevisiae, which should cause the THCAS protein to pass through the endoplasmic reticulum and/or the Golgi apparatus prior to being shuttled to the cell membrane. Routing through the endoplasmic reticulum and/or the Golgi apparatus may allow the TS to be post-translationally modified as discussed above.

[0560] Strains in which the signal peptides are expected to target the TS to vacuoles also had functional expression. For example, strain t631189 harbored a THCAS N-terminally fused to the signal peptide of Proteinase A from K. phaffii. The resulting enzyme is predicted to localize to the vacuole in a similar manner to Proteinase A. Transport to the vacuole is mediated by the secretory machinery of S. cerevisiae, which should cause the THCAS protein to pass through the endoplasmic reticulum and/or the Golgi apparatus. Routing through the endoplasmic reticulum and/or the Golgi apparatus may allow the TS to be post-translationally modified as discussed above.

[0561] It was also noted that both targeting to the cytosol and targeting exclusively to the endoplasmic reticulum without routing through the secretory pathway appeared to inhibit functional expression of a TS. For example, strain t631201 harbored a THCAS C-terminally fused to the signal peptide of UBC6 (UniProt Accession ID: P33296). This THCAS was found to have less activity than strains in which the THCAS was routed through the secretory pathway on the way to the endoplasmic reticulum. The resulting enzyme in strain t631201 is predicted to localize to the cytosolic side of the ER membrane in a similar manner to UBC6. Without wishing to be bound by a particular theory, the reduced activity of a TS localized to the cytosol may be caused by multiple factors including: the reductive environment of the cytosol precluding the formation of essential internal disulfide bridges of a TS and/or the lack of essential post-translation glycosylation of nascent peptides occurring in the cytosol.

[0562] The results of this assay suggest that the subcellular localization of a TS is a critical determinant of its activity in S. cerevisiae. Subcellular localizations which route a TS through the secretory machinery, specifically the endoplasmic reticulum and/or the Golgi apparatus, were found to be effective in ensuring that the TS is active in vivo. Multiple localization tags were found to accomplish this as shown in FIG. 6. In particular, an N-terminal signal peptide sourced from Ost1 or MFalpha2 combined with a C-terminal HDEL signal peptide produced the highest apparent THCAS activity out of the signal peptides tested.

TABLE 7
Strain Information associated with Example 1

| Strain | | |
|---|---|---|
| ID | N-terminal signal peptide information | C-terminal signal peptide information |
| 631185 | n/a | n/a |
| 631188 | n/a | Saccharomyces cerevisiae Protein disulfide- |
| | | isomerase protein endoplasmic reticulum |
| | | retention signal (HDEL from PDI1) (SEQ ID |
| | | NO: 17). |
| 631189 | Komagataella phaffii Vacuolar aspartyl protease | |
| | Proteinase A signal peptide (PEP4) (SEQ ID NO: | |
| | 706) | |
| 631190 | Saccharomyces cerevisiae Mating factor alpha | Saccharomyces cerevisiae Protein disulfide- |
| | protein leader peptide (mfalpha2_leader) (SEQ ID | isomerase protein endoplasmic reticulum |
| | NO: 16). | retention signal (HDEL from PDI1) (SEQ ID |
| | | NO: 17). |
| 631191 | Saccharomyces cerevisiae Aspartic proteinase 3 | Saccharomyces cerevisiae Protein disulfide- |
| | protein signal peptide (YLR120C_SP_native) | isomerase protein endoplasmic reticulum |
| | (SEQ ID NO: 608). | retention signal (HDEL from PDI1) (SEQ ID |
| | | NO: 17). |
| 631192 | Saccharomyces cerevisiae Aspartic proteinase 3 | Saccharomyces cerevisiae Golgi retention |
| | protein signal peptide (YLR120C_SP_native) | signal (KLD) (SEQ ID NO: 630). |
| | (SEQ ID NO: 608). | |
| 631193 | Saccharomyces cerevisiae Mating factor alpha | Saccharomyces cerevisiae Protein disulfide- |
| | protein leader peptide (mfalpha2_leader) (SEQ ID | isomerase protein endoplasmic reticulum |
| | NO: 16). | retention signal (HDEL from PDI1) (SEQ ID |
| | | NO: 17). |
| 631194 | Saccharomyces cerevisiae Mating factor alpha | Saccharomyces cerevisiae Golgi retention |
| | protein leader peptide (mfalpha2_leader) (SEQ ID | signal (KLD) (SEQ ID NO: 630). |
| | NO: 16). | |
| 631195 | Saccharomyces cerevisiae Fumarate reductase | Saccharomyces cerevisiae Protein disulfide- |
| | protein leader peptide (Osm1p leader, native) | isomerase protein endoplasmic reticulum |
| | (SEQ ID NO: 610). | retention signal (HDEL from PDI1) (SEQ ID |
| | | NO: 17). |
| 631196 | Saccharomyces cerevisiae Fumarate reductase | Saccharomyces cerevisiae Golgi retention |
| | protein leader peptide (Osm1p leader, native) | signal (KLD) (SEQ ID NO: 630). |
| | (SEQ ID NO: 610). | |
| 631197 | Saccharomycopsis fibuligera Glucoamylase | Saccharomyces cerevisiae Protein disulfide- |
| | protein leader peptide (Sf leader) (SEQ ID NO: | isomerase protein endoplasmic reticulum |
| | 612). | retention signal (HDEL from PDI1) (SEQ ID |
| | | NO: 17). |
| 631198 | Saccharomycopsis fibuligera Glucoamylase | Saccharomyces cerevisiae Golgi retention |
| | protein leader peptide (Sf leader) (SEQ ID NO: | signal (KLD) (SEQ ID NO: 630). |
| | 612). | |
| 631199 | Saccharomyces cerevisiae Dolichyl- | Saccharomyces cerevisiae Protein disulfide- |
| | diphosphooligosaccharide-protein | isomerase protein endoplasmic reticulum |
| | glycosyltransferase subunit 1 protein leader | retention signal (HDEL from PDI1) (SEQ ID |
| | peptide (Ost1 leader) (SEQ ID NO: 614). | NO: 17). |
| 631200 | Saccharomyces cerevisiae Dolichyl- | Saccharomyces cerevisiae Golgi retention |
| | diphosphooligosaccharide-protein | signal (KLD) (SEQ ID NO: 630). |
| | glycosyltransferase subunit 1 protein leader | |
| | peptide (Ost1 leader) (SEQ ID NO: 614). | |
| 631201 | n/a | Saccharomyces cerevisiae Ubiquitin- |
| | | conjugating enzyme E2 6 protein tail anchor |
| | | (tail anchor UBC6) (SEQ ID NO: 632). |
| 631202 | n/a | Saccharomyces cerevisiae peroxisomal citrate |
| | | synthase protein signal peptide (SKL from |
| | | CIT2) (SEQ ID NO: 634). |
| 631203 | n/a | Saccharomyces cerevisiae Mating hormone |
| | | A-factor 1 protein c-terminal prenylation |
| | | signal (CVIA from MFA1) (SEQ ID NO: |
| | | 636). |
| 631204 | Saccharomyces kudriavzevii Sodium/hydrogen | n/a |
| | exchanger protein signal peptide | |
| | (YDR456W_SP_native) (SEQ ID NO: 616). | |
| 631205 | Saccharomyces cerevisiae Mitochondrial import | n/a |
| | receptor subunit TOM70 signal peptide | |
| | (YNL121C_SP_native) (SEQ ID NO: 618). | |
| 631206 | Saccharomyces cerevisiae Aspartic proteinase 3 | n/a |
| | protein signal peptide (YLR120C_SP_native) | |
| | (SEQ ID NO: 608). | |
| 631207 | Saccharomyces cerevisiae Mating factor alpha | n/a |
| | signal peptide (mfalpha2_leader) (SEQ ID NO: | |
| | 16). | |
| 631208 | Saccharomyces cerevisiae Dolichyl- | n/a |
| | diphosphooligosaccharide-protein | |
| | glycosyltransferase subunit 1 protein leader | |
| | peptide (Ost1 leader) (SEQ ID NO: 614). | |
| 631209 | Saccharomycopsis fibuligera Glucoamylase | n/a |
| | protein leader peptide (Sf leader) (SEQ ID NO: | |
| | 612) | |
| 631210 | Saccharomyces cerevisiae Fumarate reductase | n/a |
| | protein leader peptide (OSM1-leader-T23L,S25L) | |
| | (SEQ ID NO: 620). | |
| 631211 | Saccharomyces cerevisiae Lanosterol 14-alpha | n/a |
| | demethylase protein leader peptide (ERG11- | |
| | leader) (SEQ ID NO: 622). | |
| 631212 | Saccharomyces cerevisiae Fumarate reductase | n/a |
| | protein leader peptide (Osm1p leader, native) | |
| | (SEQ ID NO: 610). | |
| 631213 | Saccharomyces cerevisiae Carboxypeptidase Y | n/a |
| | protein leader peptide (PRC1 1-111) (SEQ ID | |
| | NO: 624). | |
| 631214 | Saccharomyces cerevisiae Saccharopepsin protein | n/a |
| | vacuole targeting peptide (PEP4 1-24) (SEQ ID | |
| | NO: 626). | |
| 631215 | Saccharomyces cerevisiae Saccharopepsin protein | n/a |
| | vacuole targeting peptide (PEP4 2-76) (SEQ ID | |
| | NO: 628). | |
| 631216 | Saccharomyces cerevisiae Mating factor alpha | n/a |
| | protein leader peptide (mfalpha2_leader) (SEQ ID | |
| | NO: 16). | |

### Example 2: Screen to Identify Functional Expression of Tetrahydrocannabinolic Acid Synthases (THCASs)

[0563] To identify THCAS genes that can be functionally expressed in host cells, a library of 34 THCAS candidate genes was designed from sequences in C. sativa transcriptomic datasets. The THCAS candidate genes were recoded in silico for expression in S. cerevisiae and synthesized in the integrative yeast expression vector shown in FIG. 5. Each candidate enzyme expression construct was transformed into an S. cerevisiae CEN.PK strain that also expressed a prenyltransferase enzyme capable of catalyzing reaction R4 in FIG. 2. Strain 616313, expressing GFP, was included in the library screen as a negative control for enzyme activity. All candidate enzymes in the library were expressed with an N-terminal MFalpha2 signal peptide (SEQ ID NO: 16) and a C-terminal HDEL signal peptide (SEQ ID NO: 17). A methionine residue was also added at the amino terminus of SEQ ID NO: 16.

[0564] A terminal product assay was conducted as follows: each thawed glycerol stock of THCAS transformants was stamped into a well of YEP+4% dextrose media. Samples were incubated at 30° C. in a shaking incubator for 2 days. A portion of each of the resulting cultures was stamped into a well of YEP+4% galactose+1 mM olivetolic acid (FIG. 1, Structure 6a). Samples were incubated at 20° C. and shaken in a shaking incubator for 4 days. Every 24 hours during those 4 days, 2% galactose and 1 mM olivetolic acid were spiked into the cultures. Sodium citrate buffer adjusted to pH 5.5 was added to each well at a final concentration of 100 mM. Samples were incubated at 20° C. in a shaking incubator for 2 days. A portion of each of the resulting production cultures was stamped into a well of phosphate buffered saline (PBS). Optical measurements were taken on a plate reader, with absorbance measured at 600 nm and fluorescence at 528 nm with 485 nm excitation. Samples were incubated at 30° C. in a shaking incubator for 2 days. 100% methanol was stamped into the production cultures in half-height deepwell plates. Plates were heat sealed and frozen. Samples were then thawed for 30 min and spun down at 4° C. A portion of the supernatant was stamped into half-area 96 well plates. THCA, CBDA, and CBCA production in the samples was quantified via Liquid chromatography-mass spectrometry (LC-MS).

[0565] The library of candidate THCAS enzymes was assayed for activity in a screen using the assay described above. LC-MS analysis revealed 6 candidate THCASs that demonstrated measurable amounts of THCA (FIG. 7). The data represent the average of four biological replicates. Strain IDs and their corresponding activity are shown in Table 8. For example, as shown in Table 8, strain 752426 produced 4181.53 μg/L with a standard deviation of 750.62 μg/L.

TABLE 8
THCA titers of THCAS candidate enzymes in S. cerevisiae

| | THCAS protein SEQ ID | | | |
|---|---|---|---|---|
| | NO (without signal | | | Standard |
| Strain | peptides or N-terminal | | Mean | Deviation |
| ID | methionine) | Strain Type | THCA [μg/L] | THCA [μg/L] |
| 616313 | — | GFP Negative Ctrl | 0 | 0 |
| 752426 | 37 | Library | 4181.53 | 750.62 |
| 752427 | 43 | Library | 3416.75 | 3017.77 |
| 752430 | 40 | Library | 4194.83 | 1674.79 |
| 752436 | 39 | Library | 3179.48 | 419.78 |
| 752445 | 38 | Library | 3931.0 | 314.04 |
| 752456 | 42 | Library | 2469.28 | 346.57 |

[0566] Since product promiscuity has been noted among the Cannabis terminal synthases, the production of cannabidiolic acid (CBDA) was quantified via LC-MS to determine whether library members in the terminal product assay also display cannabidiolic acid synthase (CBDAS) activity. Strain t616314, expressing a CBDAS from C. sativa set forth as SEQ ID NO: 136, was included in the library as a positive control for CBDAS activity. 1 library member demonstrated detectable CBDA (FIG. 8). Strain IDs and their corresponding activity are shown in Table 9. The data represent the average of four biological replicates. As shown in Table 9, strain 752452 produced 3765.4 μg/L CBDA with a standard deviation of 420.17 μg/L.

TABLE 9
CBDA titers of CBDAS candidate enzymes in S. cerevisiae

| | CBDAS protein SEQ ID | | | |
|---|---|---|---|---|
| | NO (without signal | | | Standard |
| Strain | peptides or N-terminal | | Mean | Deviation |
| ID | methionine) | Strain Type | CBDA [μg/L] | CBDA [μg/L] |
| 616313 | N/A | GFP Negative Control | 0 | 0 |
| 616314 | 136 | Positive Control (CBDAS) | 457.3 | 360.6 |
| 752452 | 36 | Library | 3765.4 | 420.17 |

[0567] To determine whether library members also display cannabichromenic acid synthase (CBCAS) activity, the production of cannabichromenic acid (CBCA) was quantified via LC-MS. Enzyme candidates previously annotated as putative Cannabis CBCAS demonstrated no CBCAS activity. Surprisingly, 1 library member that demonstrated detectable THCA also demonstrated detectable CBCA (FIG. 9). The data represents the average of four biological replicates. Strain IDs and their corresponding activity are shown in Table 10. As shown in Table 10, strain 752436 produced 1198.58 μg/L CBCA with a standard deviation of 209.39 μg/L. Strain IDs and their corresponding sequences are shown in Table 21.

TABLE 10
CBCA titers of CBCAS candidate enzymes in S. cerevisiae

| | CBCAS protein SEQ ID | | | |
|---|---|---|---|---|
| | NO (without signal | | | Standard |
| | peptides or N-terminal | | Mean | Deviation |
| Strain | methionine) | Strain type | CBDA [μg/L] | CBDA [μg/L] |
| 616313 | N/A | GFP Negative Control | 0 | 0 |
| 752436 | 39 | Library | 1198.58 | 209.39 |

### Example 3: Additional Screen to Identify Functional Expression of Terminal Synthases

[0568] To identify additional terminal synthase genes that can be functionally expressed in host cells, a second library of 1380 candidate terminal synthase genes was designed. Candidate terminal synthases included individual point mutation variants and multiple point mutation variants of a C. sativa THCAS (e.g., Uniprot Accession: Q8GTB6) and a C. sativa CBDAS (e.g., Uniprot Accession: A6P6V9), terminal synthase candidates designed from sequences in C. sativa transcriptomic datasets, and “ancestral” terminal synthases inferred by probabilistic models applied to phylogenies of the terminal synthases and their homologs. Point mutations were designed based on proximity to the active site, PSSM/Rosetta energy calculations for improved stability and/or abundance, mutations of glycosylation sites, and/or ancestral reconstructions.

[0569] The terminal synthase candidate genes were recoded in silico for expression in S. cerevisiae. These sequences were synthesized in the integrative yeast expression vector shown in FIG. 5. Each candidate enzyme expression construct was transformed into an S. cerevisiae CEN.PK strain that also expressed a prenyltransferase enzyme capable of catalyzing reaction R4 in FIG. 2. Strain 616313, expressing GFP, was included in the library screen as a negative control for enzyme activity. Strain 701870, expressing a THCAS from C. sativa set forth as SEQ ID NO: 284, was included in the library as a positive control for THCAS activity and was used to establish hit ranking of candidate THCAS enzymes. Strain 616314, expressing a CBDAS from C. sativa set forth as SEQ ID NO: 136, was included in the library as a positive control for CBDAS activity and was also used to establish hit ranking for candidate CBDAS enzymes. A putative C. sativa CBCAS enzyme that was previously disclosed was not found to be active. Instead, a C. sativa THCAS enzyme (set forth in SEQ ID NO: 21) was found to demonstrate CBCAS activity in addition to THCAS activity using the assays described in this Example, and was accordingly used as a positive control for CBCAS activity (strain 616315).

[0570] All candidate enzymes in the library, as well as the enzymes expressed by positive control strains 701870, 616314, and 616315 were expressed with an N-terminal MFalpha2 signal peptide (SEQ ID NO: 16) and a C-terminal HDEL signal peptide (SEQ ID NO: 17). A methionine residue was also added at the amino terminus of SEQ ID NO: 16.

[0571] The terminal product assay was conducted in the same manner as described in Example 2. THCA, CBDA, and CBCA production in each sample were quantified via Liquid chromatography-mass spectrometry (LC-MS).

[0572] Of the 1380 candidate terminal synthases assayed, 41 produced more THCA than positive control strain 701870 (FIG. 10). The data represents the average of two biological replicates. Strain IDs and their corresponding activity are shown in Table 10. For example, as shown in Table 11, strain 701916 produced 18800.4 μg/L THCA. Strain 1Ds and their corresponding sequences are shown in Table 22.

TABLE 11
THCA titers of THCAS candidate enzymes in S. cerevisiae

| | THCA protein SEQ ID NO | | Mean |
|---|---|---|---|
| Strain | (without signal peptides or | | THCA |
| ID | N-terminal methionine) | Strain Type | [μg/L] |
| 616313 | N/A | GFP Negative Control | 10.6 |
| 701870 | 284 | Positive Control | 14706.2 |
| | | (C. sativa THCAS) | |
| 701916 | 138 | Library | 18800.4 |
| 701919 | 140 | Library | 21623.2 |
| 701934 | 141 | Library | 51917.7 |
| 701939 | 285 | Library | 18128.1 |
| 701954 | 286 | Library | 38816.3 |
| 701963 | 287 | Library | 29334.4 |
| 701977 | 288 | Library | 20745.7 |
| 701990 | 289 | Library | 25646.1 |
| 701992 | 144 | Library | 60171.5 |
| 701996 | 290 | Library | 27496.8 |
| 702000 | 291 | Library | 24592.9 |
| 702043 | 292 | Library | 17862.8 |
| 702050 | 293 | Library | 37749.3 |
| 702054 | 294 | Library | 14819.1 |
| 702090 | 295 | Library | 24898.8 |
| 702123 | 155 | Library | 52639.5 |
| 702150 | 158 | Library | 49485.4 |
| 702154 | 296 | Library | 15523.1 |
| 702232 | 297 | Library | 24238.7 |
| 702240 | 298 | Library | 33056.0 |
| 702258 | 164 | Library | 38012.6 |
| 702350 | 178 | Library | 16354.7 |
| 702660 | 198 | Library | 62259.9 |
| 702688 | 199 | Library | 28542.9 |
| 702761 | 299 | Library | 23306.7 |
| 702767 | 300 | Library | 16585.2 |
| 702801 | 301 | Library | 23258.5 |
| 702891 | 200 | Library | 50769.3 |
| 702894 | 302 | Library | 16799.2 |
| 702927 | 303 | Library | 20384.9 |
| 702942 | 304 | Library | 20404.8 |
| 702993 | 305 | Library | 22118.6 |
| 703174 | 306 | Library | 40926.8 |
| 703178 | 203 | Library | 58146.5 |
| 703239 | 307 | Library | 14713.8 |
| 703256 | 308 | Library | 37302.0 |
| 703289 | 309 | Library | 15747.5 |
| 703637 | 310 | Library | 15628.4 |
| 703690 | 311 | Library | 21803.7 |
| 703722 | 312 | Library | 24552.7 |
| 703725 | 313 | Library | 15524.9 |

[0573] Additionally, 62 candidate terminal synthases assayed demonstrated mean CBDA titers greater than that of the positive control 616314 (FIG. 11). The data represents the average of two biological replicates. Strain IDs and their corresponding activity are shown in Table 12. For example, as shown in Table 12, strain 701964 produced 10674.6 pig/L CBDA. Strain Ds and their corresponding sequences are shown in Table 22. Positive control strain 616314 demonstrated considerably higher CBDA production in the screen conducted in Example 3 than in the screen conducted in Example 2. Such differences may be attributable to the high throughput nature of the screening assays and differences between the growth conditions used during the two screens. As would be understood by one of ordinary skill in the art, the relative activity for candidate terminal synthases in a given screen is determined relative to control strains tested within the same screen under the same growth conditions.

TABLE 12
CBDA titers of CBDAS candidate enzymes in S. cerevisiae

| | CBDA protein SEQ ID | | |
|---|---|---|---|
| | NO (without signal | | Mean |
| Strain | peptides or N-terminal | | CBDA |
| ID | methionine) | Strain Type | [μg/L] |
| 616313 | 135 | GFP Negative Control | 0 |
| 616314 | 136 | Positive Control | 3264.431 |
| | | (CBDAS) | |
| 701964 | 143 | Library | 10674.6 |
| 702056 | 149 | Library | 10038.3 |
| 702105 | 151 | Library | 3368.8 |
| 702109 | 152 | Library | 3735.5 |
| 702115 | 153 | Library | 6054.6 |
| 702136 | 156 | Library | 3486.9 |
| 702187 | 160 | Library | 4416.3 |
| 702257 | 163 | Library | 6009.7 |
| 702261 | 165 | Library | 4621.9 |
| 702276 | 166 | Library | 4323.2 |
| 702280 | 168 | Library | 5437.8 |
| 702297 | 170 | Library | 5264.8 |
| 702304 | 171 | Library | 7678.5 |
| 702308 | 172 | Library | 4048.8 |
| 702338 | 175 | Library | 5407.8 |
| 702342 | 176 | Library | 3770.6 |
| 702346 | 177 | Library | 12380.6 |
| 702350 | 178 | Library | 11520.1 |
| 702370 | 179 | Library | 5722.1 |
| 702376 | 180 | Library | 33308.5 |
| 702412 | 182 | Library | 11128.6 |
| 702462 | 183 | Library | 3335.8 |
| 702470 | 184 | Library | 3686.9 |
| 702485 | 185 | Library | 3360.4 |
| 702507 | 186 | Library | 4561.6 |
| 702513 | 187 | Library | 3504 |
| 702517 | 188 | Library | 4611 |
| 702531 | 189 | Library | 3320.5 |
| 702563 | 190 | Library | 3947.8 |
| 702571 | 191 | Library | 3888 |
| 702581 | 192 | Library | 5132.8 |
| 702585 | 193 | Library | 37977 |
| 702591 | 194 | Library | 3640.5 |
| 702595 | 195 | Library | 11914.1 |
| 702601 | 196 | Library | 9766.7 |
| 702603 | 197 | Library | 4000.2 |
| 702948 | 201 | Library | 4171.4 |
| 703131 | 202 | Library | 5298.7 |
| 703300 | 204 | Library | 3729.3 |
| 703306 | 205 | Library | 3341.2 |
| 703452 | 207 | Library | 5307.5 |
| 703455 | 208 | Library | 3638.3 |
| 703459 | 209 | Library | 4458.8 |
| 703473 | 210 | Library | 6768.2 |
| 703482 | 211 | Library | 6324.4 |
| 703520 | 212 | Library | 5350.2 |
| 703524 | 213 | Library | 4349.4 |
| 703528 | 214 | Library | 9277.4 |
| 703584 | 215 | Library | 3639.7 |
| 703607 | 216 | Library | 5067.5 |
| 703611 | 217 | Library | 4306.7 |
| 703634 | 218 | Library | 3801.2 |
| 703638 | 219 | Library | 5746.3 |
| 703685 | 220 | Library | 7115.2 |
| 703699 | 221 | Library | 5055.9 |
| 703703 | 222 | Library | 3676.3 |
| 703707 | 223 | Library | 7337.2 |
| 703721 | 224 | Library | 5717.1 |
| 703738 | 225 | Library | 12609.1 |

[0574] 36 candidate terminal synthases assayed demonstrated mean CBCA titers greater than that of the positive control 616315 (FIG. 12). The data represents the average of two biological replicates. Strain IDs and their corresponding activity are shown in Table 13. For example, as shown in Table 13, strain 701909 produced 4064.4 μg/L CBCA. Strain IDs and their corresponding sequences are shown in Table 22.

TABLE 13
CBCA titers of CBCAS candidate enzymes in S. cerevisiae

| | CBCA protein SEQ ID | | |
|---|---|---|---|
| | NO (without signal | | Mean |
| Strain | peptides or N-terminal | | CBCA |
| ID | methionine) | Strain Type | [μg/L] |
| 616313 | — | GFP Negative Control | 82.7 |
| 616315 | 21 | Positive Control | 1233.9 |
| | | (C. sativa THCAS) | |
| 701909 | 137 | Library | 4064.4 |
| 701916 | 138 | Library | 2276.1 |
| 701917 | 139 | Library | 1692.4 |
| 701919 | 140 | Library | 1898.9 |
| 701940 | 142 | Library | 2363.1 |
| 701964 | 143 | Library | 1906.4 |
| 701998 | 145 | Library | 1308.4 |
| 702004 | 146 | Library | 3174.3 |
| 702008 | 147 | Library | 3290.3 |
| 702022 | 148 | Library | 3718.5 |
| 702056 | 149 | Library | 1390.1 |
| 702080 | 150 | Library | 1393.4 |
| 702118 | 154 | Library | 3349.2 |
| 702147 | 157 | Library | 2419.7 |
| 702155 | 159 | Library | 4183.0 |
| 702201 | 161 | Library | 4688.6 |
| 702215 | 162 | Library | 6804.2 |
| 702258 | 164 | Library | 2506.6 |
| 702278 | 167 | Library | 3813.0 |
| 702288 | 169 | Library | 16597.8 |
| 702315 | 173 | Library | 1414.6 |
| 702329 | 174 | Library | 1411.9 |
| 702346 | 177 | Library | 1990.6 |
| 702350 | 178 | Library | 16078.8 |
| 702370 | 179 | Library | 2292.1 |
| 702376 | 180 | Library | 10128.8 |
| 702396 | 181 | Library | 1358.4 |
| 702412 | 182 | Library | 1246.4 |
| 702585 | 193 | Library | 2694.3 |
| 702595 | 195 | Library | 1437.9 |
| 702601 | 196 | Library | 14507.0 |
| 702688 | 199 | Library | 10566.0 |
| 703300 | 204 | Library | 2790.4 |
| 703306 | 205 | Library | 3554.0 |
| 703341 | 206 | Library | 3815.8 |

[0575] A number of strains produced multiple TS products, demonstrating two or more of THCAS, CBDAS and CBCAS activity. In particular, the following strains demonstrated both THCAS and CBCAS activity: strain 701916 which expresses a TS (SEQ ID NO: 138) that includes amino acid substitutions R311Q, K40E, H41Y, V46P, L5I F, V52L, 163V, 174T, N90V, T96S, V103I, A116S, and P542L relative to SEQ ID NO: 14, strain 701919, which expresses a TS (SEQ ID NO: 140) that includes amino acid substitution V288L relative to SEQ ID NO: 14; strain 702258, which expresses a TS (SEQ ID NO: 164) that includes amino acid substitutions R31Q, K40Q, 1H41Y, 174T, N90V, V129I, V288L, K296R, F345L, F360Y, A411V, E424D, H494P, and A495E relative to SEQ ID NO: 14; and strain 702688, which expresses a TS (SEQ ID NO: 199) that includes amino acid substitutions I63L, L443I, T446I, V462I, S464N, L479M, H494F, A495E, N528D, P542L, and H543R relative to SEQ ID NO: 14.

[0576] The following strains demonstrated both CBDAS and CBCAS activity: strain 701964, which expresses a TS (SEQ ID NO: 143) that includes amino acid substitution H69Q relative to SEQ ID NO: 13, strain 702056, which expresses a TS (SEQ ID NO: 149) that includes amino acid substitution H69R relative to SEQ ID NO: 13; strain 702346, which expresses a TS (SEQ ID NO: 177) that includes amino acid substitution A414M relative to SEQ ID NO: 13; strain 702370, which expresses a TS (SEQ ID NO: 179) that includes amino acid substitution Y416F relative to SEQ ID NO: 13; strain 702376, which expresses a TS (SEQ ID NO: 180) that includes amino acid substitution S116A relative to SEQ ID NO: 13; strain 702412, which expresses a TS (SEQ ID NO: 182) that includes amino acid substitution S116G relative to SEQ ID NO: 13; strain 702585, which expresses a TS (SEQ ID NO: 193) that includes amino acid substitution A414V relative to SEQ ID NO: 13; strain 702595, which expresses a TS (SEQ ID NO: 195) that includes amino acid substitution S100A relative to SEQ ID NO: 13; strain 702601, which expresses a TS (SEQ ID NO: 196) that includes amino acid substitutions E40Q, P46A, A49S, P51A, F53L, I54V, H58N, Q60P, A97G, S98T, V131I, H138R, F171L, G175A, V183A, N239S, A244V, K249R, I259M, G270E, F275V, V290L, K298R, H304Q, V311I, G313S, H320L, E346Q, F347L, T353I, F362Y, N363D, A365T, K379Q, K380N, T381A, S384K, A398V, E426D, T448I, 1461L, V464I, S466N, T471M, T494N, E497K, A527V, P544R, and H546R relative to SEQ ID NO: 20; strain 703300, which expresses a TS (SEQ ID NO: 204) that includes amino acid substitution E441S relative to SEQ ID NO: 13; and strain 703306, which expresses a TS (SEQ ID NO: 205) that includes amino acid substitution E441T relative to SEQ ID NO: 13.

[0577] Strain 702350 demonstrated THCAS, CBDAS, and CBCAS activity. This strain expresses a TS (SEQ ID NO: 178) that includes amino acid substitutions R31Q, K40Q, H41Y, V46A, A47T, P49A, H56N, Q58P, I63V, I74T, N90V, A95G, V129I, H136R, G173A, V181A, N237S, A242V, K247R, 1257M, G268E, F273V, V288L, K296R, H302Q, V309I, G311S, H318L, E344Q, F345L, T351I, F360Y, N361D, A363T, K377Q, K378N, T379A, S382K, A396V, A411V, E424D, T446I, I459L, V462I, S464N, T469M, T492N, H494P, A495K, P542R, and H544R relative to SEQ ID NO: 14.

### Example 4: Screen to Identify Functional Expression of Additional Terminal Synthases

[0578] To identify additional terminal synthase genes that can be functionally expressed in host cells, a library of approximately 1762 candidate terminal synthases was designed using ancestral sequence reconstruction and recombination of single-mutations identified in Example 3 that demonstrated improvements in terminal synthase activity.

[0579] Ancestral Sequence Reconstruction: Terminal synthase candidates sourced from publicly available RNAseq datasets were used to generate multiple protein phylogenies. Putative “ancestral” terminal synthases were constructed at the nodes of these phylogenetic trees via a phylogenetic analysis of maximum likelihood.

[0580] Recombination of single mutations: Terminal synthase candidates in Example 3 included single point mutants of two C. sativa THCASs (Uniprot Accession: I1V0C5 and Q8GTB6) and one C. sativa CBDAS (Uniprot Accession: A6P6V9). A Multiple Sequence Alignment (MSA) of these mutant sequences and other terminal synthase homologs was generated and used as the basis for learning interacting positions within terminal synthase candidates. This was used to inform the mutation space to explore and subsequently recombine into the aforementioned templates.

[0581] The terminal synthase candidate genes were recoded in silico for expression in S. cerevisiae and synthesized in the integrative yeast expression vector shown in FIG. 5. Each candidate enzyme expression construct was transformed into an S. cerevisiae CEN.PK strain that also expressed a prenyltransferase enzyme capable of catalyzing reaction R4 in FIG. 2. Strain 616313, expressing GFP, was included in the library screen as a negative control for enzyme activity. All candidate enzymes in the library were expressed with an N-terminal MFalpha2 signal peptide (SEQ ID NO. 16) and a C-terminal HDEL signal peptide (SEQ ID NO: 17). A methionine residue was also added at the amino terminus of SEQ ID NO: 16.

[0582] Strains t807949 and t820182, expressing two different C. sativa THCASs (corresponding to Uniprot Accession: I1V0C5 and Q8GTB6, respectively), were included in the library as positive controls for THCAS activity. Strain t807973, expressing a C. sativa CBDAS (corresponding to Uniprot Accession: A6P6V9), was included in the library as a positive control for CBDAS activity. Positive control sequences were expressed with an N-terminal MFalpha2 signal peptide (SEQ ID NO: 16) and a C-terminal HDEL signal peptide (SEQ ID NO: 17). A methionine residue was also added at the amino terminus of SEQ ID NO: 16. Strain t807914, expressing a GFP fluorescent reporter was included in the library as a negative control.

[0583] A terminal product assay was conducted as follows: each thawed glycerol stock of terminal synthase transformants was stamped into a well of YEP+4% dextrose media. Samples were incubated at 30° C. in a shaking incubator for 2 days. A portion of each of the resulting cultures was stamped into a well of YEP+4% galactose+1 mM olivetolic acid (FIG. 1, Structure 6a). Samples were incubated at 20° C. and shaken in a shaking incubator for 4 days. Every 24 hours during those 4 days, 2% galactose and 1 mM olivetolic acid were spiked into the cultures. Sodium citrate buffer adjusted to pH 5.5 was added to each well at a final concentration of 100 mM. Samples were incubated at 20° C. in a shaking incubator for 2 days. A portion of each of the resulting production cultures was stamped into a well of PBS. Optical measurements were taken on a plate reader, with absorbance measured at 600 nm and fluorescence at 528 nm with 485 nm excitation. Samples were incubated at 30° C. in a shaking incubator for 2 days. 100% methanol was stamped into the production cultures in half-height deepwell plates. Plates were heat sealed and frozen. Samples were then thawed for 30 min and spun down at 4° C. A portion of the supernatant was stamped into half-area 96 well plates. THCA, CBDA, and CBCA production in the samples was quantified via LC-MS.

[0584] 142 strains were elevated to a secondary assay to confirm their activity. The secondary assay was performed in the same manner as the primary assay with the following exceptions: four biological replicates were included for each strain, and a parallel assay was run wherein olivetolic acid was replaced with divaric acid. In addition to THCA, CBDA, and CBCA their counterparts derived from divaric acid THCVA, CBDVA, and CBCVA respectively were also quantified via LC/MS.

[0585] 101 strains demonstrated mean THCA titers greater than the mean THCA titer of the t820182 positive control (FIG. 13A, Table 14). The t820182 positive control expresses a THCAS corresponding to the sequence associated with Uniprot Accession Q8GTB6, except that instead of its endogenous signal peptide, it is expressed with an N-terminal MFalpha2 signal peptide (SEQ ID NO: 16) and a C-terminal HDEL signal peptide (SEQ ID NO: 17). A methionine residue was also added at the amino terminus of SEQ ID NO: 16.

[0586] 10 strains demonstrated mean THCA titers greater than the mean THCA titer of the t807949 positive control (FIG. 13A, Table 14). The t807949 positive control expresses a THCAS corresponding to the sequence associated with Uniprot Accession I1VOCS, except that instead of its endogenous signal peptide, it is expressed with an N-terminal MFalpha2 signal peptide (SEQ ID NO: 16) and a C-terminal HDEL signal peptide (SEQ ID NO: 17). A methionine residue was also added at the amino terminus of SEQ ID NO: 16. The strains that demonstrated mean THCA titers greater than the mean THCA titer of the t807949 positive control included: strain t826279, which expresses a TS that includes amino acid substitutions R31Q, H56N, I74T, N90V, A250P, S255V, Q475K, T492N, H494E, and A495E relative to SEQ ID NO: 14; strain t825084, which expresses a TS that includes amino acid substitutions R31Q, M61S, I74T, N90V, A250P, S255V, T492N, and H494E relative to SEQ ID NO: 14; strain t826132, which expresses a TS that includes amino acid substitutions R31Q, K40Q, H41Y, I74T, N90V, V129I, V288L, K296R, F345L, F360Y, A411V, E424D, H494P, and A495E relative to SEQ ID NO: 14; strain t825263, which expresses a TS that includes amino acid substitutions R31Q, K40Q, H41Y, I74T, N90V, V129I, V288L, K296R, F345L, F360Y, A411V, E424D, H494P, and A495E relative to SEQ ID NO: 14; strain t825221, which expresses a TS that includes amino acid substitutions R31Q, K40Q, H41Y, I74T, N90V, V129I, V288L, K296R, F345L, F360Y, A411V, E424D, H494P, and A495E relative to SEQ ID NO: 14; strain t825099, which expresses a TS that includes amino acid substitutions R31Q, K40Q, H41Y, I74T, N90V, V129I, V288L, K296R, F345L, F360Y, A411V, E424D, H494P, A495E, and Y419F relative to SEQ ID NO: 14; strain t825085, which expresses a TS that includes amino acid substitutions R31Q, K40Q, H41Y, H56N, I74T, N90V, V1291, V288L, K296R, F345L, F360Y, A411V, E424D, Q475K, H494P, and A495E relative to SEQ ID NO: 14; strain t825496, which expresses a TS that includes amino acid substitutions R31Q, K40Q, H41 Y, 174T, N90V, V1291, S255V, V288L, K296R, T340E, F345L, F360Y, A411V, E424D, Q475K, T492N, H494P, and A495E relative to SEQ ID NO: 14; strain t825914, which expresses a TS that includes amino acid substitutions R31Q, K40Q, H41Y, V46P, V52L, H56N, M61S, 174T, N90V, V129I, S255V, V288L, K296R, T340E, F345L, F360Y, A411V, E424D, Q475K, T492N, H494P, and A495E relative to SEQ ID NO: 14; and strain t826054, which expresses a TS that includes amino acid substitutions R31Q, K40Q, H41Y, I74T, N90V, V1291, V288L, K296R, F345L, F360Y, A411V, E424D, H494P, and A495E relative to SEQ ID NO: 14.

[0587] 98 strains demonstrated mean CBDA titers greater than the mean CBDA titer of the t807973 positive control, with 50 of these strains demonstrating titers greater than 10-fold higher (FIG. 13B, Table 14), including: strain t826093, which expresses a TS that includes amino acid substitutions S100A, S116A, and H213N relative to SEQ ID NO: 13; strain t826274, which expresses a TS that includes amino acid substitutions H69Q, G95A, S116A, T339E, and Q343E relative to SEQ ID NO: 13; strain t825987, which expresses a TS that includes amino acid substitutions H69Q, G95A, S116A, and T339E relative to SEQ ID NO: 13; strain t826072, which expresses a TS that includes amino acid substitution Si 16A relative to SEQ ID NO: 13; strain t825341, which expresses a TS that includes amino acid substitutions T47A, L49P, N56H, N57D, P58Q, H69Q, H89N, and G95A, and an insertion at residue S253, relative to SEQ ID NO: 13: strain t825248, which expresses a TS that includes amino acid substitutions G95A, S116A, and Q343E relative to SEQ ID NO: 13; strain t824773, which expresses a TS that includes amino acid substitutions G95A, S116A, and T339E relative to SEQ ID NO: 13; strain t825766, which expresses a TS that includes amino acid substitutions K50N, H69Q, G95A, H213N, T339E, and L344M relative to SEQ ID NO: 13; strain t824918, which expresses a TS that includes amino acid substitutions H69Q, G95A, S116A, H213N, T339E, and Q343E relative to SEQ ID NO: 13; strain t825034, which expresses a TS that includes amino acid substitutions K50N, H69Q, G95A, and Q343E relative to SEQ ID NO: 13; strain t825126, which expresses a TS that includes amino acid substitutions K50N, H69Q, G95A, H213N, Q343E, and L344M relative to SEQ ID NO: 13, strain t824688, which expresses a TS that includes amino acid substitutions G95A, S116A, H213N, T339E, Q343E, and L344M relative to SEQ ID NO: 13, strain t825154, which expresses a TS that includes amino acid substitutions G95A, S116A, T339E, and Q343E relative to SEQ ID NO: 13, strain t825930, which expresses a TS that includes amino acid substitutions G95A, S116A, H213N, Q343E, and L344M relative to SEQ ID NO: 13; strain t824807, which expresses a TS that includes amino acid substitutions G95A, S116A, H213N, T339E, and Q343E relative to SEQ ID NO: 13, strain t825277, which expresses a TS that includes amino acid substitutions R31Q, T47A, L49P, N56H, N57D, P58Q, H69Q, H89N, and G95A, and an insertion at residue S253, relative to SEQ ID NO: 13, strain t824603, which expresses a TS that includes amino acid substitutions K50N, G95A, S116A, H213N, L344M, and N527D relative to SEQ ID NO: 13; strain t825936, which expresses a TS that includes amino acid substitutions G95A, S116A, T339E, Q343E, and L344M relative to SEQ ID NO: 13; strain t825123, which expresses a TS that includes amino acid substitution A414V relative to SEQ ID NO: 13; strain t825215, which expresses a TS that includes amino acid substitution at A414V relative to SEQ ID NO: 13; strain t825585, which expresses a TS that includes amino acid substitution A414V relative to SEQ ID NO: 13; strain t825012, which expresses a TS that includes amino acid substitutions K50N, H69Q, H213N, T339E, Q343E, and A414V relative to SEQ ID NO: 13; strain t825773, which expresses a TS that includes amino acid substitutions G95A, A414V, and N527D relative to SEQ ID NO: 13; strain t824786, which expresses a TS that includes amino acid substitutions H69Q, G95A, H213N, S322E, Q343E, L344M, and A414V relative to SEQ ID NO: 13; strain t826099, which expresses a TS that includes amino acid substitutions G95A, Q343E, G378T, and A414V relative to SEQ ID NO: 13; strain t824942, which expresses a TS that includes amino acid substitutions K50N, H69Q, G95A, T339E, Q343E, L344M, and A414V relative to SEQ ID NO: 13; strain t824626, which expresses a TS that includes amino acid substitutions H69Q, G95A, H213N, L344M, and A414V relative to SEQ ID NO: 13; strain t824654, which expresses a TS that includes amino acid substitutions K50N, H69Q, G95A, Q343E, and A414V relative to SEQ ID NO: 13; strain t824746, which expresses a TS that includes amino acid substitutions H69Q, G95A, H213N, T339E, Q343E, L344M, and A414V relative to SEQ ID NO: 13; strain t825877, which expresses a TS that includes amino acid substitutions G95A, H213N, Q343E, and A414V relative to SEQ ID NO: 13; strain t825841, which expresses a TS that includes amino acid substitutions G95A, H213N, T339E, Q343E, A414V, and D492N relative to SEQ ID NO: 13; strain t824646, which expresses a TS that includes amino acid substitutions H69Q, G95A, H213N, Q343E, A414V, and N527D relative to SEQ ID NO: 13; strain t824659, which expresses a TS that includes amino acid substitutions G95A, H213N, T339E, G378T, A410V, A414V, and I445V relative to SEQ ID NO: 13; strain t824540, which expresses a TS that includes amino acid substitutions H69Q, G95A, Q343E, A414V, and N527D relative to SEQ ID NO: 13; strain t825933, which expresses a TS that includes amino acid substitutions K50N, H69Q, G95A, H213N, Q343E, L344M, and A414V relative to SEQ ID NO: 13; strain t826097, which expresses a TS that includes amino acid substitutions K50N, G95A, and A414V relative to SEQ ID NO: 13; strain t824571, which expresses a TS that includes amino acid substitutions K50N, H69Q, G95A, H213N, T339E, Q343E, and A414V relative to SEQ ID NO: 13; strain t825593, which expresses a TS that includes amino acid substitutions G95A, T339E, L344M, and A414V relative to SEQ ID NO: 13; strain t825108, which expresses a TS that includes amino acid substitutions K50N, H213N, Q343E, L344M, and A414V relative to SEQ ID NO: 13; strain t825724, which expresses a TS that includes amino acid substitutions G95A, H213N, T339E, Q343E, and A414V relative to SEQ ID NO: 13; strain t824539, which expresses a TS that includes amino acid substitutions K50N, G95A, H213N, T339E, Q343E, A414V, and D492N relative to SEQ ID NO: 13; strain t824653, which expresses a TS that includes amino acid substitutions K50N, G95A, H213N, T339E, Q343E, L344M, and A414V relative to SEQ ID NO: 13; strain t825833, which expresses a TS that includes amino acid substitutions G95A, T339E, Q343E, L344M, and A414V relative to SEQ ID NO: 13; strain t825739, which expresses a TS that includes amino acid substitutions G95A, Q343E, L344M, and A414V relative to SEQ ID NO: 13; strain t825907, which expresses a TS that includes amino acid substitutions G95A, H213N, Q343E, L344M, and A414V relative to SEQ ID NO: 13; strain t824625, which expresses a TS that includes amino acid substitutions G95A, T339E, Q343E, and A414V relative to SEQ ID NO: 13; strain t825889, which expresses a TS that includes amino acid substitutions G95A, H213N, T339E, L344M, and A414V relative to SEQ ID NO: 13, strain t824612, which expresses a TS that includes amino acid substitutions K50N, G95A, H213N, Q343E, L344M, and A414V relative to SEQ ID NO: 13; strain t825862, which expresses a TS that includes amino acid substitutions K50N, G95A, Q343E, L344M, and A414V relative to SEQ ID NO: 13; and strain t825935, which expresses a TS that includes amino acid substitutions G95A, H213N, T339E, Q343E, L344M, and A414V relative to SEQ ID NO: 13.

[0588] 11 strains demonstrated mean CBCA titers greater than 71000.00 μg/L (FIG. 13C, Table 14), including: strain t824932, which expresses a TS that includes amino acid substitutions R31Q, K40Q, H41 Y, H56N, M61S, I74T, N90V, V129I, S255V, V288L, M290F, K296R, T340E, F345L, T351I, F360Y, A411V, E424D, Q475K, T492N, H494P, and A495E relative to SEQ ID NO: 14, strain t824618, which expresses a TS that includes amino acid substitutions R31Q, K40Q, H41Y, V46P, H56N, Q58S, M61S, I74T, N90V, V129I, S255V, V288L, M290F, K296R, T340E, F345L, F360Y, A411V, E424D, T4461, Q475K, T492N, H494P, and A495E relative to SEQ ID NO: 14; strain t825910, which expresses a TS that includes amino acid substitutions R31Q, K40Q, H41Y, V46P, M61S, I74T, N90V, V129I, S255V, V288L, M290F, K296R, T340E, F345L, F360Y, A411V, E424D, T492N, H494P, and A495E relative to SEQ ID NO: 14; strain t824996, which expresses a TS that includes amino acid substitutions R31Q, K40Q, H41Y, V46P, M61S, I74T, N90V, V1291, S255V, V288L, M290F, K296R, T340E, F345L, F360Y, A411V, E424D, T492N, H494P, and A495E relative to SEQ ID NO: 14; strain t825528, which expresses a TS that includes amino acid substitutions R31Q, K40Q, H41Y, V46P, H56N, Q58S, M61S, I74T, N90V, V129I, V158L, S255V, V288L, M290F, K296R, T340E, F345L, F360Y, A411V, E424D, Q475K, T492N, H494P, and A495E relative to SEQ ID NO: 14; strain t825043, which expresses a TS that includes amino acid substitutions R31Q, K40Q, H41Y, Q58S, M61S, I74T, N90V, V129I, H143E, S255V, V288L, M290F, K296R, T340E, F345L, F360Y, A411V, E424D, Q475K, T492N, H494P, and A495E relative to SEQ ID NO: 14; strain t825978, which expresses a TS that includes amino acid substitutions R31Q, K40Q, H41Y, M61S, 174T, N90V, V1291, S255V, V288L, M290F, K296R, T340E, F345L, F360Y, A411V, E424D, Q475K, T492N, H494P, and A495E relative to SEQ ID NO: 14; strain t824498, which expresses a TS that includes amino acid substitutions R31Q, K40Q, H41Y, V46P, H56N, M61S, I74T, N90V, V129I, H143E, S255V, V288L, M290F, K296R, T340E, F345L, Y354F, F360Y, A411V, E424D, Q475K, T492N, H494P, and A495E relative to SEQ ID NO: 14; strain t825259, which expresses a TS that includes amino acid substitutions R31Q, K40Q, H41Y, H56N, Q58S, M61S, I74T, N90V, V1291, S255V, V288L, M290F, K296R, T340E, F345L, F360Y, A411V, E424D, Q475K, T492N, H494P, and A495E relative to SEQ ID NO: 14, strain t825077, which expresses a TS that includes amino acid substitutions R31Q, K40Q, H41Y, I74T, N90V, V129I, H143E, S255V, V288L, M290F, K296R, F345L, F360Y, A411V, E424D, T492N, H494P, and A495E relative to SEQ ID NO: 14; and strain t825269, which expresses a TS that includes amino acid substitutions R31Q, K40Q, H41Y, V46P, V52I, H56N, Q58S, M61S, I74T, N90V, V129I, S255V, V288L, M290F, K296R, T340E, F345L, F360Y, A411V, E424D, Q475K, T492N, H494P, and A495E relative to SEQ ID NO: 14. This level of production of CBCA is particularly surprising since other annotated C. sativa CBCASs reported in the literature failed to demonstrate CBCAS activity when screened in Example 2. Significantly, these candidate terminal synthases represent the first C. sativa-derived terminal synthases with significant CBCAS activity.

[0589] Similarly, 73 strains demonstrated mean THCVA titers greater than the mean THCVA titer of the t820182 positive control. 15 strains demonstrated mean THCVA titers greater than the mean THCVA titer of the t807949 positive control (FIG. 14A, Table 15), including: strain t825377, which expresses a TS that includes amino acid substitutions R31Q, K40Q, H41Y, N44T, A47T, P49A, L59F, I74T, V85I, S88L, N90V, A95G, P542L, and H543R relative to SEQ ID NO: 14; strain t825213, which expresses a TS that includes amino acid substitutions R31Q, K40Q, H41Y, I74T, N90V, V1291, V288L, K296R, F345L, F360Y, A411V, E424D, H494P, and A495E relative to SEQ ID NO: 14; strain t825219, which expresses a TS that includes amino acid substitutions R31Q, K40Q, H41Y, N44T, A47T, P49A, L59F, 174T, V85I, S88L, N90V, A95G, P542L, and H543R relative to SEQ ID NO: 14; strain t825379, which expresses a TS that includes amino acid substitutions R31Q, K40Q, H41Y, 174T, N90V, V1291, V288L, K296R, F345L, F360Y, A411V, E424D, H494P, and A495E relative to SEQ ID NO: 14; strain t825151, which expresses a TS that includes amino acid substitutions R31Q, K40Q, H41Y, I74T, N90V, V129I, V288L, K296R, F345L, F360Y, A411V, E424D, H494P, and A495E relative to SEQ ID NO: 14; strain t826100, which expresses a TS that includes amino acid substitutions R31Q, K40Q, H41Y, I74T, N90V, V129I, V288L, K296R, F345L, F360Y, A411V, E424D, H494P, and A495E relative to SEQ ID NO: 14; strain t825129, which expresses a TS that includes amino acid substitutions R31Q, K40Q, H41Y, I74T, N90V, V1291, V288L, K296R, F345L, F360Y, A411V, E424D, H494P, and A495E relative to SEQ ID NO: 14; strain t825297, which expresses a TS that includes amino acid substitutions R31Q, 174T, N90V, A250D, S255V, T492N, and H494E relative to SEQ ID NO: 14; strain t824990, which expresses a TS that includes amino acid substitutions I74T, N90V, A250P, and H494E relative to SEQ ID NO: 14, strain t825049, which expresses a TS that includes amino acid substitutions M61S, N90V, A250D, S255V, Q475K, T492N, and A495E relative to SEQ ID NO: 14; strain t825086, which expresses a TS that includes amino acid substitutions R31Q, K40Q, H41Y, V46P, H56N, Q58S, M61S, I74T, N90V, V1291, H143E, S255V, V288L, K296R, T340E, F345L, Y354F, F360Y, A411V, E424D, Q475K, T492N, H494P, and A495E relative to SEQ ID NO: 14; strain t825058, which expresses a TS that includes amino acid substitutions R31Q I74T, N90V, A250D, and S255V relative to SEQ ID NO: 14, strain t826279, which expresses a TS that includes amino acid substitutions R31Q, H56N, 174T, N90V, A250P, S255V, Q475K, T492N, H494E, and A495E relative to SEQ ID NO: 14; strain t826132, which expresses a TS that includes amino acid substitutions R31Q, K40Q, H41Y, I74T, N90V, V1291, V288L, K296R, F345L, F360Y, A411V, E424D, H494P, and A495E relative to SEQ ID NO: 14; and strain t825085, which expresses a TS that includes amino acid substitutions R31Q, K40Q, H41Y, H56N, 174T, N90V, V1291, V288L, K296R, F345L, F360Y, A411V, E424D, Q475K, H494P, and A495E relative to SEQ ID NO: 14.

[0590] 55 strains demonstrated mean CBDVA titers greater than the mean CBDVA titer of the t807973 positive control, with 50 of these strains demonstrating titers greater than 10-fold higher (FIG. 14B, Table 15), including: strain t826093, which expresses a TS that includes amino acid substitutions S100A, S116A, and H213N relative to SEQ ID NO: 13; strain t826274, which expresses a TS that includes amino acid substitutions H69Q, G95A, S116A, T339E, and Q343E relative to SEQ ID NO: 13; strain t825987, which expresses a TS that includes amino acid substitutions H69Q, G95A, S116A, and T339E relative to SEQ ID NO: 13; strain t826072, which expresses a TS that includes amino acid substitution S116A relative to SEQ ID NO: 13; strain t826096, which expresses a TS that includes amino acid substitution S116A relative to SEQ ID NO: 13; strain t825125, which expresses a TS that includes amino acid substitution K50N relative to SEQ ID NO: 13; strain t825217, which expresses a TS that includes amino acid substitution K50N relative to SEQ ID NO: 13; strain t825341, which expresses a TS that includes amino acid substitutions T47A, L49P, N56H, N57D, P58Q, H69Q, H89N, and G95A, and an insertion at residue S253, relative to SEQ ID NO: 13; strain t825248, which expresses a TS that includes amino acid substitutions G95A, Si 16A, and Q343E relative to SEQ ID NO: 13; strain t824773, which expresses a TS that includes amino acid substitutions G95A, S116A, and T339E relative to SEQ ID NO: 13; strain t825766, which expresses a TS that includes amino acid substitutions K50N, H69Q, G95A, H213N, T339E, and L344M relative to SEQ ID NO: 13; strain t824918, which expresses a TS that includes amino acid substitutions H69Q, G95A, Si 16A, H213N, T339E, and Q343E relative to SEQ ID NO: 13; strain t825034, which expresses a TS that includes amino acid substitutions K50N, H69Q, G95A, and Q343E relative to SEQ ID NO: 13; strain t825126, which expresses a TS that includes amino acid substitutions K50N, H69Q, G95A, H213N, Q343E, and L344M relative to SEQ ID NO: 13; strain t824688, which expresses a TS that includes amino acid substitutions G95A, S116A, H213N, T339E, Q343E, and L344M relative to SEQ ID NO: 13; strain t825154, which expresses a TS that includes amino acid substitutions G95A, S116A, T339E, and Q343E relative to SEQ ID NO: 13; strain t825930, which expresses a TS that includes amino acid substitutions G95A, S116A, H213N, Q343E, and L344M relative to SEQ ID NO: 13; strain t824807, which expresses a TS that includes amino acid substitutions G95A, S116A, H213N, T339E, and Q343E relative to SEQ ID NO: 13; strain t825277, which expresses a TS that includes amino acid substitutions R31Q, T47A, L49P, N56H, N57D, P58Q, H69Q, H89N, and G95A, and an insertion at residue S253, relative to SEQ ID NO: 13; strain t824603, which expresses a TS that includes amino acid substitutions K50N, G95A, S116A, H213N, L344M, and N527D relative to SEQ ID NO: 13; strain t826076, which expresses a TS that includes amino acid substitution S116A relative to SEQ ID NO: 13; strain t825936, which expresses a TS that includes amino acid substitutions G95A, S116A, T339E, Q343E, and L344M relative to SEQ ID NO: 13; strain t825123, which expresses a TS that includes amino acid substitution A414V relative to SEQ ID NO: 13; strain t825215, which expresses a TS that includes amino acid substitution A414V relative to SEQ ID NO: 13; strain t825585, which expresses a TS that includes amino acid substitution A414V relative to SEQ ID NO: 13; strain t825012, which expresses a TS that includes amino acid substitutions K50N, H69Q, H213N, T339E, Q343E, and A414V relative to SEQ ID NO: 13; strain t825773, which expresses a TS that includes amino acid substitutions G95A, A414V, and N527D relative to SEQ ID NO: 13; strain t824786, which expresses a TS that includes amino acid substitutions H69Q, G95A, H213N, S322E, Q343E, L344M, and A414V relative to SEQ ID NO: 13; strain 1826099, which expresses a TS that includes amino acid substitutions G95A, Q343E, G378T, and A414V relative to SEQ ID NO: 13; strain t824942, which expresses a TS that includes amino acid substitutions K50N, H69Q, G95A, T339E, Q343E, L344M, and A414V relative to SEQ ID NO: 13; strain t826070, which expresses a TS that includes amino acid substitution S116A relative to SEQ ID NO: 13; strain t824626, which expresses a TS that includes amino acid substitutions H69Q, G95A, H213N, L344M, and A414V relative to SEQ ID NO: 13. strain t824654, which expresses a TS that includes amino acid substitutions K50N, H69Q, G95A, Q343E, and A414V relative to SEQ ID NO: 13; strain t824746, which expresses a TS that includes amino acid substitutions H69Q, G95A, H213N, T339E, Q343E, L344M, and A414V relative to SEQ ID NO: 13; strain 1825877, which expresses a TS that includes amino acid substitutions G95A, H213N, Q343E, and A414V relative to SEQ ID NO: 13; strain t825841, which expresses a TS that includes amino acid substitutions G95A, H213N, T339E, Q343E, A414V, and D492N relative to SEQ ID NO: 13; strain t824646, which expresses a TS that includes amino acid substitutions H69Q, G95A, H213N, Q343E, A414V, and N527D relative to SEQ ID NO: 13; strain t824659, which expresses a TS that includes amino acid substitutions G95A, H213N, T339E, G378T, A410V, A414V, and 1445V relative to SEQ ID NO: 13; strain t824540, which expresses a TS that includes amino acid substitutions H69Q, G95A, Q343E, A414V, and N527D relative to SEQ ID NO: 13; strain t825933, which expresses a TS that includes amino acid substitutions K50N, H69Q, G95A, H213N, Q343E, L344M, and A414V relative to SEQ ID NO: 13; strain t826097, which expresses a TS that includes amino acid substitutions K50N, G95A, and A414V relative to SEQ ID NO: 13; strain t824571, which expresses a TS that includes amino acid substitutions K50N, H69Q, G95A, H213N, T339E, Q343E, and A414V relative to SEQ ID NO: 13; strain t825593, which expresses a TS that includes amino acid substitutions G95A, T339E, L344M, and A414V relative to SEQ ID NO: 13; strain 1825108, which expresses a TS that includes amino acid substitutions K50N, H213N, Q343E, L344M, and A414V relative to SEQ ID NO: 13; strain t825724, which expresses a TS that includes amino acid substitutions G95A, H213N, T339E, Q343E, and A414V relative to SEQ ID NO: 13; strain t824539, which expresses a TS that includes amino acid substitutions K50N, G95A, H213N, T339E, Q343E, A414V, and D492N relative to SEQ ID NO: 13; strain 1824653, which expresses a TS that includes amino acid substitutions K50N, G95A, H213N, T339E, Q343E, L344M, and A414V relative to SEQ ID NO: 13; strain t825833, which expresses a TS that includes amino acid substitutions G95A, T339E, Q343E, L344M, and A414V relative to SEQ ID NO: 13; strain t825739, which expresses a TS that includes amino acid substitutions G95A, Q343E, L344M, and A414V relative to SEQ ID NO: 13; strain t825907, which expresses a TS that includes amino acid substitutions G95A, H213N, Q343E, L344M, and A414V relative to SEQ ID NO: 13; strain t824625, which expresses a TS that includes amino acid substitutions G95A, T339E, Q343E, and A414V relative to SEQ ID NO: 13; strain t825889, which expresses a TS that includes amino acid substitutions G95A, H213N, T339E, L344M, and A414V relative to SEQ ID NO: 13; strain t824612, which expresses a TS that includes amino acid substitutions K50N, G95A, H213N, Q343E, L344M, and A414V relative to SEQ ID NO: 13; strain t825862, which expresses a TS that includes amino acid substitutions K50N, G95A, Q343E, L344M, and A414V relative to SEQ ID NO: 13; and strain t825935, which expresses a TS that includes amino acid substitutions G95A, H213N, T339E, Q343E, L344M, and A414V relative to SEQ ID NO: 13.

[0591] 11 strains demonstrated mean CBCVA titers greater than 5000.00 μg/L (FIG. 14C, Table 15), including: strain t825341, which expresses a TS that includes amino acid substitutions T47A, L49P, N56H, N57D, P58Q, H69Q, H89N, and G95A, and an insertion at residue S253, relative to SEQ ID NO: 13; strain t824932, which expresses a TS that includes amino acid substitutions R31Q, K40Q, H41Y, H56N, M61S, 174T, N90V, V1291, S255V, V288L, M290F, K296R, T340E, F345L, T351I, F360Y, A411V, E424D, Q475K, T492N, H494P, and A495E relative to SEQ ID NO: 14; strain t824618, which expresses a TS that includes amino acid substitutions R31Q, K40Q, H41Y, V46P, H56N, Q58S, M61S, 174T, N90V, V129I, S255V, V288L, M290F, K296R, T340E, F345L, F360Y, A411V, E424D, T446I, Q475K, T492N, H494P, and A495E relative to SEQ ID NO: 14; strain t825910, which expresses a TS that includes amino acid substitutions R31Q, K40Q, H41Y, V46P, M61S, I74T, N90V, V1291, S255V, V288L, M290F, K296R, T340E, F345L, F360Y, A411V, E424D, T492N, H494P, and A495E relative to SEQ ID NO: 14; strain t824996, which expresses a TS that includes amino acid substitutions R31Q, K40Q, H41Y, V46P, H56N, M61S, I74T, N90V, V1291, S255V, V288L, M290F, K296R, F345L, F360Y, A411V, E424D, T492N, H494P, and A495E relative to SEQ ID NO: 14; strain t825528, which expresses a TS that includes amino acid substitutions R31Q, K40Q, H41Y, V46P, H56N, Q58S, M61S, I74T, N90V, V1291, V158L, S255V, V288L, M290F, K296R, T340E, F345L, F360Y, A411V, E424D, Q475K, T492N, H494P, and A495E relative to SEQ ID NO: 14; strain t825043, which expresses a TS that includes amino acid substitutions R31Q, K40Q, H41Y, Q58S, M61S, I74T, N90V, V129I, H143E, S255V, V288L, M290F, K296R, T340E, F345L, F360Y, A411V, E424D, Q475K, T492N, H494P, and A495E relative to SEQ ID NO: 14; strain t825978, which expresses a TS that includes amino acid substitutions R31Q, K40Q, H41Y, M61S, I74T, N90V, V1291, S255V, V288L, M290F, K296R, T340E, F345L, F360Y, A411V, E424D, Q475K, T492N, H494P, and A495E relative to SEQ ID NO: 14; strain t824498, which expresses a TS that includes amino acid substitutions R31Q, K40Q, H41Y, V46P, H56N, M61S, I74T, N90V, V1291, H143E, S255V, V288L, M290F, K296R, T340E, F345L, Y354F, F360Y, A411V, E424D, Q475K, T492N, H494P, and A495E relative to SEQ ID NO: 14; strain t825259, which expresses a TS that includes amino acid substitutions R31Q, K40Q, H41Y, H56N, Q58S, M61S, 174T, N90V, V129I, S255V, V288L, M290F, K296R, T340E, F345L, F360Y, A411V, E424D, Q475K, T492N, H494P, and A495E relative to SEQ ID NO: 14; and strain t825269, which expresses a TS that includes amino acid substitutions R31Q, K40Q, H41Y, V46P, V52I, H56N, Q58S, M61S, I74T, N90V, V129L, S255V, V288L, M290F, K296R, T340E, F345L, F360Y, A411V, E424D, Q475K, T492N, H494P, and A495E relative to SEQ ID NO: 14.

[0592] Table 14 shows THCA, CBDA, and CBCA activity data for the 142 strains elevated to a secondary assay. Table 15 shows THCVA, CBDVA, and CBCVA activity data for the 142 strains elevated to a secondary assay. Sequence data for strains in Table 14 and Table 15 are shown in Table 23.

[0593] Increased titer of C6 and/or C4 terminal products observed among the terminal synthase candidates in this library may be the result of one or more mutations acting alone or in combination to increase solubility and/or increase stability of the terminal synthase enzymes. For example, some of the hit THCAS candidates comprised one or more of the following mutations: V52I, V288L, T340E, F345L, F360Y, Y419F, E424D, T492N, K40Q, H56N, A250D, Q475K, and H494E, all of which were mapped to the surface of the tertiary structure of C. sativa THCAS (Uniprot Accession No. Q8GTB6), indicating that the mutations may contribute to increased solubilization or stability of the enzyme, which may result in increased THCA and/or THCVA titer. Similarly, some of the hit CBDAS candidates comprised one or more of the following mutations, S322E, T339E, K50N, H213N, L344M, and N527D, all of which were mapped to the surface of the tertiary structure of C. sativa CBDAS (Uniprot Accession No. A6P6V9), indicating that the mutations may contribute to increased solubilization or stability of the enzyme, which may result in increased CBDA and/or CBDVA titer. Also, some of the hit CBCAS candidates comprised one or more of the following mutations of H41Y, M61S, H56N, Q58S, V52I, H143E, T340E, F345L, A411V, E424D, T492N, Q475K, Y354F, and H494P, all of which were mapped to the surface of the tertiary structure of C. sativa THCAS (Uniprot Accession No. Q8GTB6), indicating that the mutations may contribute to increased solubilization or stability of the enzyme, which may result in increased CBCA and/or CBCVA titer.

[0594] Without wishing to be bound by any theory, one or more mutations described herein may have an effect on the selectivity of terminal synthase substrates. For example, the following mutations were found to be unique among the THCVA hits relative to the THCA hits. L59F, A47T, P49A, S88L, H143E, A250D, Y354F, P542L, H543R, N44T, Q58S, and A95G. Interestingly, mutation Y354F was mapped to within 6 angstroms of the catalytic trio of C. sativa THCAS (Uniprot Accession No. Q8GTB6) and to within approximately 8.4 angstroms of the location of the C6 carbon of THCA. Based on proximity to the active site, the residue at amino acid 354 may interact directly with THCA and/or THCVA. The mutation Y354F, which changes the residue from polar to nonpolar, may alter the hydrophobicity of the binding pocket and may affect the binding of terminal synthase substrates. Similarly, the mutation T4461 was found to be unique among the CBCVA hits relative to the CBCA hits. Based on a generated comparative model, the residue at position 446 is predicted to be within 4 angstroms of the substrate binding site of C. sativa THCAS (Uniprot Accession No. Q8GTB6). The mutation T446I, which changes the residue from an uncharged polar residue to a bulkier hydrophobic residue, may alter the hydrophobicity of the binding pocket and may affect the binding of terminal synthase substrates.

[0595] Since product promiscuity has previously been noted among the C. sativa terminal synthases and observed among the terminal synthase candidates in this library, correlating template/mutations to changes in product profile may indicate critical residues for determining product specificity. The CBCAS hits identified here provide examples of this. Each CBCAS hit strain was derived from three putative THCAS templates; two that were derived from C. sativa RNAseq data and one from a previously engineered ancestral reconstruction. These hits range in their production of CBCA as a percentage of all terminal products measured (Percent Product CBCA) from approximately 41% to 100%. One mutation that may contribute to a shift in activity from THCA to CBCA is the V158L amino acid substitution. The V158 residue was mapped to the outer second-shell (approximately 15 angstroms from the active site) of the C. sativa THCAS (Uniprot Accession No. Q8GTB6) tertiary structure, indicating that the mutation may contribute to increased solubilization or stability of the enzyme.

[0596] The CBDAS hits demonstrate the most product promiscuity, evaluated as the percentage of total cannabinoids generated that is not CBDA. For example, the top 10 CBDAS range in their production of CBDA as a percentage of C6 terminal products (e.g. THCA, CBDA, and CBCA) measured (Percent Product CBDA) from approximately 64-71%.

TABLE 14
Terminal C6 Product Titers of terminal synthase candidate enzymes in S. cerevisiae

| | | Mean | Std Dev | Mean | Std Dev | Mean | Std Dev | % | % | % |
|---|---|---|---|---|---|---|---|---|---|---|
| Strain | Strain | THCA | THCA | CBDA | CBDA | CBCA | CBCA | Product | Product | Product |
| ID | Type | [μg/L] | [μg/L] | [μg/L] | [μg/L] | [μg/L] | [μg/L] | THCA | CBDA | CBCA |
| t820182 | Positive | 18331.58 | 5551.4 | 0 | 0 | 2780.5 | 5654.16 | 86.83 | 0 | 13.17 |
| | Control | | | | | | | | | |
| | C. sativa | | | | | | | | | |
| | THCAS; | | | | | | | | | |
| | based on | | | | | | | | | |
| | UniProt | | | | | | | | | |
| | Q8GTB6 | | | | | | | | | |
| t807973 | Positive | 0 | 0 | 1353.01 | 1088.55 | 0 | 0 | 0 | 100 | 0 |
| | Control | | | | | | | | | |
| | C. sativa | | | | | | | | | |
| | CBDAS: | | | | | | | | | |
| | based on | | | | | | | | | |
| | UniProt | | | | | | | | | |
| | A6P6V9 | | | | | | | | | |
| t807949 | Positive | 179871.9 | 22612.45 | 572.77 | 687.71 | 0 | 0 | 99.68 | 0.32 | 0 |
| | Control | | | | | | | | | |
| | C. sativa | | | | | | | | | |
| | THCAS: | | | | | | | | | |
| | based on | | | | | | | | | |
| | UniProt | | | | | | | | | |
| | I1V0C5 | | | | | | | | | |
| t807914 | GFP | 185.76 | 788.13 | 0 | 0 | 112.35 | 476.68 | 62.31 | 0 | 37.69 |
| | negative | | | | | | | | | |
| | control | | | | | | | | | |
| t826093 | Library | 0 | 0 | 34334.05 | 3304.61 | 5044.43 | 512.95 | 0 | 87.19 | 12.81 |
| t826274 | Library | 0 | 0 | 20894.82 | 3946.51 | 9146.36 | 1486.94 | 0 | 69.55 | 30.45 |
| t825987 | Library | 0 | 0 | 19997.88 | 1302.17 | 9508.21 | 307.27 | 0 | 67.78 | 32.22 |
| t826072 | Library | 0 | 0 | 15787.12 | 2075.94 | 2277.92 | 1612.75 | 0 | 87.39 | 12.61 |
| t826096 | Library | 0 | 0 | 8612.72 | 1079.62 | 0 | 0 | 0 | 100 | 0 |
| t825125 | Library | 0 | 0 | 2907.54 | 531.8 | 0 | 0 | 0 | 100 | 0 |
| t825217 | Library | 0 | 0 | 2575.18 | 499.68 | 0 | 0 | 0 | 100 | 0 |
| t825189 | Library | 0 | 0 | 2322.66 | 730.6 | 0 | 0 | 0 | 100 | 0 |
| t825341 | Library | 874.4 | 1748.8 | 19511.89 | 5608.99 | 5253.05 | 2116.14 | 3.41 | 76.1 | 20.49 |
| t825248 | Library | 2270.53 | 1876.34 | 28530.73 | 10073.78 | 4571.34 | 1673.78 | 6.42 | 80.66 | 12.92 |
| t824773 | Library | 2506.6 | 72.57 | 31384.4 | 1807.27 | 4940.11 | 213.91 | 6.46 | 80.82 | 12.72 |
| t825766 | Library | 2708.12 | 3135.13 | 31210.55 | 8037.03 | 7539.44 | 2792.47 | 6.53 | 75.28 | 18.19 |
| t824918 | Library | 2942.18 | 1167.41 | 24067.74 | 7915.22 | 10025.72 | 2933.76 | 7.94 | 64.99 | 27.07 |
| t825034 | Library | 3016.39 | 623.49 | 26421.46 | 1136.01 | 5768.93 | 357.68 | 8.57 | 75.05 | 16.39 |
| t824932 | Library | 3086.6 | 93.19 | 6286.93 | 359.65 | 71623.65 | 1280.02 | 3.81 | 7.76 | 88.43 |
| t824618 | Library | 3511.33 | 925.7 | 7020.75 | 1776.77 | 82634.08 | 12238.37 | 3.77 | 7.54 | 88.7 |
| t825126 | Library | 3663.4 | 436.82 | 27222.4 | 3933.86 | 6702.8 | 1170.07 | 9.75 | 72.42 | 17.83 |
| t825910 | Library | 3812.23 | 2571.69 | 7892.58 | 1037.84 | 104479.6 | 13503.13 | 3.28 | 6.79 | 89.93 |
| t824688 | Library | 3887.4 | 479.19 | 47259.26 | 7166.47 | 7028.42 | 973.64 | 6.68 | 81.24 | 12.08 |
| t824996 | Library | 4019.47 | 506.1 | 6351.29 | 341.45 | 77120.13 | 6795.12 | 4.59 | 7.26 | 88.15 |
| t825528 | Library | 4359.14 | 2968.72 | 8124.85 | 908.41 | 93747.57 | 3886.43 | 4.1 | 7.65 | 88.25 |
| t825154 | Library | 4669.17 | 2088.18 | 48091.14 | 20690.96 | 7446.43 | 2922.36 | 7.76 | 79.88 | 12.37 |
| t825930 | Library | 4713.96 | 637.8 | 49322.15 | 6471.21 | 8886.39 | 834.67 | 7.49 | 78.39 | 14.12 |
| t825043 | Library | 5076.72 | 787.61 | 7859.78 | 1163.31 | 79846.68 | 7884.93 | 5.47 | 8.47 | 86.06 |
| t824807 | Library | 5276.46 | 832.07 | 65039.56 | 8938.99 | 9300.73 | 854.28 | 6.63 | 81.69 | 11.68 |
| t825978 | Library | 5374.33 | 965.67 | 8730.75 | 2181.61 | 114494.1 | 28085.4 | 4.18 | 6.79 | 89.03 |
| t825277 | Library | 5745.89 | 1606.75 | 39692.98 | 12567.82 | 12523.52 | 4387.66 | 9.91 | 68.48 | 21.61 |
| t824498 | Library | 5865.53 | 190.4 | 8266.22 | 525.63 | 100691.4 | 5784.06 | 5.11 | 7.2 | 87.69 |
| t824603 | Library | 5891.59 | 1556.45 | 48545.08 | 3622.06 | 7914.23 | 469.91 | 9.45 | 77.86 | 12.69 |
| t826076 | Library | 6188.95 | 8623.87 | 11806.36 | 2391.07 | 1311.31 | 1539.51 | 32.06 | 61.15 | 6.79 |
| t825259 | Library | 7070.85 | 3956.32 | 6734.56 | 1878.45 | 98822.68 | 31872.8 | 6.28 | 5.98 | 87.74 |
| t825936 | Library | 7285.23 | 1403.68 | 66600.94 | 13840.69 | 12655.6 | 2441.4 | 8.42 | 76.96 | 14.62 |
| t825077 | Library | 9676.18 | 8141.47 | 6914.54 | 613.25 | 93157.43 | 5728.56 | 8.82 | 6.3 | 84.88 |
| t825123 | Library | 13129.39 | 1680.16 | 38195.16 | 4131.58 | 3596.6 | 392.23 | 23.91 | 69.55 | 6.55 |
| t825215 | Library | 14458.48 | 2300.77 | 43420.83 | 8116.68 | 4892.32 | 974.65 | 23.03 | 69.17 | 7.79 |
| t825585 | Library | 16084.38 | 11952.6 | 16951.33 | 10430.92 | 10410.56 | 9537.7 | 37.02 | 39.02 | 23.96 |
| t825012 | Library | 16423.12 | 1279.78 | 38469.89 | 3258.45 | 8045.54 | 680.21 | 26.09 | 61.12 | 12.78 |
| t825773 | Library | 16908.56 | 19673.89 | 53659.46 | 63109.23 | 4715.74 | 5448.4 | 22.46 | 71.28 | 6.26 |
| t824786 | Library | 17024.85 | 1036.46 | 46909.53 | 3359.46 | 8844.55 | 469.07 | 23.39 | 64.45 | 12.15 |
| t826099 | Library | 17152.32 | 5378.28 | 58117.76 | 17254.5 | 10073.05 | 2895.87 | 20.1 | 68.1 | 11.8 |
| t824942 | Library | 17916.44 | 1512.96 | 44977.35 | 3617.75 | 9783.52 | 553.09 | 24.65 | 61.89 | 13.46 |
| t826070 | Library | 18913.79 | 34013.4 | 11147 | 1763.31 | 676.55 | 1353.1 | 61.53 | 36.27 | 2.2 |
| t824626 | Library | 20043.6 | 5668.51 | 41061.76 | 6019.68 | 8193.21 | 946.63 | 28.92 | 59.25 | 11.82 |
| t825269 | Library | 20540.8 | 826.88 | 10446.93 | 5014.16 | 87267.02 | 13690.06 | 17.37 | 8.83 | 73.8 |
| t824654 | Library | 21642.98 | 4153.67 | 55581.21 | 12452.82 | 11551.9 | 1723.82 | 24.38 | 62.61 | 13.01 |
| t824746 | Library | 25725.27 | 2802.84 | 74018.27 | 13387.34 | 15503.72 | 547.2 | 22.32 | 64.23 | 13.45 |
| t825877 | Library | 26212.74 | 19006.22 | 87869.41 | 64589.5 | 7634.39 | 5552.05 | 21.54 | 72.19 | 6.27 |
| t825841 | Library | 27217.96 | 13698.75 | 95039.89 | 49146.67 | 7691.8 | 4032.81 | 20.95 | 73.14 | 5.92 |
| t824646 | Library | 27813.3 | 3601.11 | 66902.36 | 12294.48 | 14156.8 | 1878.16 | 25.55 | 61.45 | 13 |
| t824659 | Library | 27816.71 | 2441.49 | 39731.58 | 4128.54 | 10675.74 | 713.97 | 35.56 | 50.79 | 13.65 |
| t824540 | Library | 27992.53 | 3829.52 | 63702.17 | 11554.57 | 13595.2 | 2138.63 | 26.59 | 60.5 | 12.91 |
| t825933 | Library | 29112.7 | 4909.41 | 73534.48 | 13378.36 | 15729.94 | 2349.67 | 24.59 | 62.12 | 13.29 |
| t826097 | Library | 30722.45 | 1543.08 | 92485.52 | 7768.6 | 9286.46 | 549.98 | 23.19 | 69.8 | 7.01 |
| t824571 | Library | 31144.98 | 2304.24 | 80291.14 | 5071.14 | 16132.56 | 1083.31 | 24.41 | 62.94 | 12.65 |
| t825593 | Library | 31819.54 | 4889.17 | 98484.76 | 15785.84 | 8831.07 | 1173.13 | 22.87 | 70.78 | 6.35 |
| t825108 | Library | 32594.21 | 10397.79 | 73969.64 | 8913.77 | 8527.07 | 687.94 | 28.32 | 64.27 | 7.41 |
| t825724 | Library | 33242.48 | 4916.65 | 94219.55 | 10637.63 | 9569.2 | 1611.95 | 24.26 | 68.76 | 6.98 |
| t824539 | Library | 33886.66 | 3579.31 | 100147.5 | 9518.53 | 12672.6 | 1714.52 | 23.1 | 68.26 | 8.64 |
| t824653 | Library | 36504.14 | 3083.62 | 114771.8 | 21926.16 | 14706.14 | 2111.64 | 21.99 | 69.15 | 8.86 |
| t825833 | Library | 38219.52 | 9569.95 | 71186.67 | 59450.93 | 13237.94 | 4154 | 31.16 | 58.04 | 10.79 |
| t825739 | Library | 40026.35 | 6779.27 | 11019.67 | 19696.98 | 11320.59 | 1787.31 | 24.78 | 68.21 | 7.01 |
| t825907 | Library | 40214.85 | 4318.7 | 111856.3 | 18211.98 | 14294.25 | 2784.41 | 24.17 | 67.24 | 8.59 |
| t824625 | Library | 40280.69 | 4883.92 | 123546.5 | 14017.51 | 14157.72 | 1393.13 | 22.63 | 69.41 | 7.95 |
| t825889 | Library | 41737.82 | 11404.51 | 126307.3 | 37393.32 | 12081.97 | 3166.52 | 23.17 | 70.12 | 6.71 |
| t824612 | Library | 44055.66 | 2420.56 | 123951.9 | 6769.44 | 15248.22 | 717.28 | 24.04 | 67.64 | 8.32 |
| t825862 | Library | 48078.31 | 27844.96 | 115099.2 | 46666.34 | 15307.49 | 9863.65 | 26.94 | 64.49 | 8.58 |
| t825935 | Library | 55811.38 | 16473.06 | 155541.2 | 44512.82 | 19120.6 | 5499.6 | 24.22 | 67.49 | 8.3 |
| t825105 | Library | 68573.64 | 59236.14 | 5401.56 | 5686.7 | 6518.39 | 8061.17 | 85.19 | 6.71 | 8.1 |
| t825301 | Library | 80134.31 | 94592.46 | 545.18 | 682.77 | 0 | 0 | 99.32 | 0.68 | 0 |
| t825377 | Library | 81694.66 | 61803.36 | 0 | 0 | 0 | 0 | 100 | 0 | 0 |
| t825092 | Library | 90351.7 | 104446.7 | 341.75 | 683.5 | 0 | 0 | 99.62 | 0.38 | 0 |
| t825075 | Library | 91015.05 | 107120.1 | 0 | 0 | 0 | 0 | 100 | 0 | 0 |
| t825213 | Library | 93328.31 | 39354.96 | 0 | 0 | 0 | 0 | 100 | 0 | 0 |
| t824771 | Library | 97204.76 | 74439.72 | 382.73 | 765.46 | 0 | 0 | 99.61 | 0.39 | 0 |
| t825025 | Library | 102900.6 | 72671.22 | 430.49 | 860.99 | 0 | 0 | 99.58 | 0.42 | 0 |
| t825090 | Library | 104539.6 | 127448.4 | 880.01 | 1083.83 | 0 | 0 | 99.17 | 0.83 | 0 |
| t826284 | Library | 104817.5 | 23220.67 | 1358.49 | 321.81 | 0 | 0 | 98.72 | 1.28 | 0 |
| t825024 | Library | 105084.3 | 9848.61 | 1645.15 | 226.76 | 0 | 0 | 98.46 | 1.54 | 0 |
| t825015 | Library | 111965.3 | 70206.39 | 1080.91 | 836.62 | 0 | 0 | 99.04 | 0.96 | 0 |
| t824526 | Library | 112833.9 | 16870.02 | 929.09 | 1079.14 | 0 | 0 | 99.18 | 0.82 | 0 |
| t824647 | Library | 116339.5 | 3676.66 | 814.13 | 542.99 | 0 | 0 | 99.31 | 0.69 | 0 |
| t825007 | Library | 117082.3 | 31979.17 | 782.5 | 905.21 | 0 | 0 | 99.34 | 0.66 | 0 |
| t825501 | Library | 118039.3 | 80485.26 | 1404.74 | 941.67 | 0 | 0 | 98.82 | 1.18 | 0 |
| t825219 | Library | 118135 | 43402.91 | 0 | 0 | 0 | 0 | 100 | 0 | 0 |
| t825286 | Library | 121000.2 | 85427.25 | 777.21 | 575.82 | 0 | 0 | 99.36 | 0.64 | 0 |
| t825071 | Library | 121633.8 | 44436.65 | 0 | 0 | 0 | 0 | 100 | 0 | 0 |
| t825047 | Library | 122529.8 | 8739.03 | 1701.41 | 110.97 | 0 | 0 | 98.63 | 1.37 | 0 |
| t825031 | Library | 123848.5 | 14348.04 | 1887.14 | 275.02 | 0 | 0 | 98.5 | 1.5 | 0 |
| t825633 | Library | 125217.8 | 20917.15 | 7999.45 | 8606.42 | 11851.01 | 14019.81 | 86.32 | 5.51 | 8.17 |
| t824861 | Library | 126847.3 | 18706.46 | 1393.03 | 140.62 | 0 | 0 | 98.91 | 1.09 | 0 |
| t824928 | Library | 128407.5 | 8973.23 | 3063.2 | 413.76 | 5359.34 | 10718.67 | 93.84 | 2.24 | 3.92 |
| t825725 | Library | 129276.8 | 24363.72 | 3462.05 | 6231.32 | 1977.48 | 3954.95 | 95.96 | 2.57 | 1.47 |
| t826036 | Library | 129790.4 | 15361.61 | 0 | 0 | 0 | 0 | 100 | 0 | 0 |
| t824903 | Library | 130596.7 | 15812.11 | 1927.83 | 184.37 | 0 | 0 | 98.55 | 1.45 | 0 |
| t824845 | Library | 131579.1 | 9933.63 | 620.61 | 716.62 | 0 | 0 | 99.53 | 0.47 | 0 |
| t825078 | Library | 132100.4 | 20618.15 | 4995.1 | 1022.5 | 7079.55 | 8239.81 | 91.63 | 3.46 | 4.91 |
| t826030 | Library | 132786 | 12489.09 | 0 | 0 | 0 | 0 | 100 | 0 | 0 |
| t824622 | Library | 134598 | 8953.97 | 1905.78 | 197.67 | 0 | 0 | 98.6 | 1.4 | 0 |
| t825141 | Library | 134902.8 | 13599.57 | 1428.11 | 179.1 | 0 | 0 | 98.95 | 1.05 | 0 |
| t825379 | Library | 136455.4 | 50611.98 | 1783.78 | 943.2 | 0 | 0 | 98.71 | 1.29 | 0 |
| t825625 | Library | 137718.2 | 11656.35 | 738.73 | 72.51 | 0 | 0 | 99.47 | 0.53 | 0 |
| t825309 | Library | 138669.3 | 10460.2 | 2635.69 | 1402.37 | 0 | 0 | 98.13 | 1.87 | 0 |
| t824930 | Library | 139552.7 | 31783 | 575.12 | 664.17 | 0 | 0 | 99.59 | 0.41 | 0 |
| t824937 | Library | 140447.8 | 12195.82 | 3271.16 | 247.67 | 0 | 0 | 97.72 | 2.28 | 0 |
| t825151 | Library | 141671.2 | 36473.09 | 1109.14 | 373.52 | 0 | 0 | 99.22 | 0.78 | 0 |
| t825708 | Library | 141893.5 | 27105.17 | 1911.75 | 841.34 | 7024.4 | 14048.8 | 94.08 | 1.27 | 4.66 |
| t825119 | Library | 142503.6 | 19647.71 | 1364.73 | 123.32 | 0 | 0 | 99.05 | 0.95 | 0 |
| t825009 | Library | 142816 | 31498.94 | 797.23 | 927.08 | 0 | 0 | 99.44 | 0.56 | 0 |
| t825109 | Library | 146421.8 | 17672.45 | 1426.59 | 159.08 | 0 | 0 | 99.04 | 0.96 | 0 |
| t825273 | Library | 148182.2 | 60701.09 | 1326.73 | 505.65 | 0 | 0 | 99.11 | 0.89 | 0 |
| t825023 | Library | 148242.5 | 31939.16 | 840.04 | 976.56 | 0 | 0 | 99.44 | 0.56 | 0 |
| t826237 | Library | 149070.3 | 5630.51 | 2401.17 | 136.07 | 0 | 0 | 98.41 | 1.59 | 0 |
| t824663 | Library | 149115.9 | 11650.5 | 941.6 | 1087.48 | 0 | 0 | 99.37 | 0.63 | 0 |
| t826137 | Library | 152044.3 | 14662.16 | 0 | 0 | 0 | 0 | 100 | 0 | 0 |
| t826100 | Library | 155826.3 | 23157.51 | 1352.42 | 91.33 | 0 | 0 | 99.14 | 0.86 | 0 |
| t825129 | Library | 157925 | 38488.72 | 1521.87 | 279.2 | 0 | 0 | 99.05 | 0.95 | 0 |
| t825297 | Library | 158813.5 | 38860.74 | 693.74 | 466.13 | 0 | 0 | 99.57 | 0.43 | 0 |
| t825057 | Library | 158892.3 | 11804.47 | 0 | 0 | 0 | 0 | 100 | 0 | 0 |
| t825029 | Library | 159426.9 | 2948.28 | 2388.92 | 126.02 | 0 | 0 | 98.52 | 1.48 | 0 |
| t825059 | Library | 160127.3 | 8557.53 | 777.36 | 897.62 | 0 | 0 | 99.52 | 0.48 | 0 |
| t824990 | Library | 161446.9 | 7696.97 | 1571.34 | 131.28 | 0 | 0 | 99.04 | 0.96 | 0 |
| t825013 | Library | 162119.3 | 6793.15 | 1570.23 | 110.25 | 0 | 0 | 99.04 | 0.96 | 0 |
| t825087 | Library | 162372.2 | 53136.98 | 0 | 0 | 0 | 0 | 100 | 0 | 0 |
| t825101 | Library | 163052.5 | 15634.97 | 454.32 | 534.85 | 0 | 0 | 99.72 | 0.28 | 0 |
| t825103 | Library | 164911.6 | 23105.15 | 631.73 | 1263.46 | 9694.81 | 19389.62 | 94.11 | 0.36 | 5.53 |
| t825049 | Library | 168132.5 | 15365.1 | 0 | 0 | 0 | 0 | 100 | 0 | 0 |
| t826280 | Library | 168823 | 20342.63 | 408.16 | 816.32 | 0 | 0 | 99.76 | 0.24 | 0 |
| t826278 | Library | 168941.8 | 36980.64 | 234.1 | 468.2 | 0 | 0 | 99.86 | 0.14 | 0 |
| t825621 | Library | 169273 | 36038.77 | 392.56 | 484.42 | 0 | 0 | 99.77 | 0.23 | 0 |
| t826208 | Library | 172607.3 | 50188.09 | 0 | 0 | 0 | 0 | 100 | 0 | 0 |
| t825086 | Library | 174306.5 | 27191.83 | 1910.66 | 420.29 | 0 | 0 | 98.92 | 1.08 | 0 |
| t825058 | Library | 177386.9 | 41557.34 | 546.93 | 373.06 | 0 | 0 | 99.69 | 0.31 | 0 |
| t826279 | Library | 180275.1 | 38783.05 | 1148.51 | 1139.49 | 0 | 0 | 99.37 | 0.63 | 0 |
| t825084 | Library | 184217.3 | 38703.58 | 199.21 | 398.42 | 0 | 0 | 99.89 | 0.11 | 0 |
| t826132 | Library | 184563.6 | 15285.63 | 1561.38 | 120.15 | 0 | 0 | 99.16 | 0.84 | 0 |
| t825263 | Library | 187383.3 | 60083.17 | 1603.21 | 1089.08 | 0 | 0 | 99.15 | 0.85 | 0 |
| t825221 | Library | 189500.8 | 29129.78 | 641.91 | 754.51 | 0 | 0 | 99.66 | 0.34 | 0 |
| t825099 | Library | 196013.3 | 34192.28 | 582.52 | 690.44 | 0 | 0 | 99.7 | 0.3 | 0 |
| t825085 | Library | 200770.4 | 24444.13 | 1377.25 | 179.39 | 0 | 0 | 99.32 | 0.68 | 0 |
| t825496 | Library | 203802.5 | 15014.44 | 2435.85 | 23.04 | 0 | 0 | 98.82 | 1.18 | 0 |
| t825914 | Library | 214120.7 | 38346.58 | 1259.72 | 845.31 | 0 | 0 | 99.42 | 0.58 | 0 |
| t826054 | Library | 229157.9 | 23616.43 | 1754.5 | 142.43 | 0 | 0 | 99.24 | 0.76 | 0 |

TABLE 15
Terminal C4 Product Titers of terminal synthase candidate enzymes in S. cerevisiae

| | | Mean | Std Dev | Mean | Std Dev | Mean | Std Dev | % | % | % |
|---|---|---|---|---|---|---|---|---|---|---|
| Strain | Strain | THCVA | THCVA | CBDVA | CBDVA | CBCVA | CBCVA | Product | Product | Product |
| ID | Type | [μg/L] | [μg/L] | [μg/L] | [μg/L] | [μg/L] | [μg/L] | THCVA | CBDVA | CBCVA |
| t820182 | Pos. Ctrl. | 14529.18 | 5730.92 | 0 | 0 | 62.84 | 266.62 | 99.57 | 0.00 | 0.43 |
| | (C. sativa | | | | | | | | | |
| | THCAS) | | | | | | | | | |
| t807973 | Pos. Ctrl. | 408.16 | 413.01 | 6187.43 | 3092.57 | 603.91 | 535.49 | 5.67 | 85.94 | 8.39 |
| | (C. sativa | | | | | | | | | |
| | CBDAS) | | | | | | | | | |
| t807949 | Pos. Ctrl | 34976.47 | 5350.18 | 0 | 0 | 0 | 0 | 100 | 0 | 0 |
| | (C. sativa | | | | | | | | | |
| | THCAS) | | | | | | | | | |
| t807914 | GFP | 0.00 | 0.00 | 0.00 | 0.00 | 0.00 | 0.00 | — | — | — |
| | negative | | | | | | | | | |
| | ctrl | | | | | | | | | |
| t826093 | Library | 4321.86 | 874.75 | 22201.28 | 2293.59 | 2702.18 | 275.39 | 14.79 | 75.97 | 9.25 |
| t826274 | Library | 5337.24 | 1789.65 | 16830.56 | 4397.14 | 2511.88 | 823.82 | 21.63 | 68.20 | 10.18 |
| t825987 | Library | 4434.11 | 258.03 | 15918.05 | 1009.78 | 2297.02 | 130.69 | 19.58 | 70.28 | 10.14 |
| t826072 | Library | 3240.22 | 308.53 | 19255.04 | 1594.67 | 2670.62 | 150.83 | 12.88 | 76.51 | 10.61 |
| t826096 | Library | 1486.61 | 62.35 | 9545.11 | 647.53 | 1369.79 | 103.39 | 11.99 | 76.97 | 11.05 |
| t825125 | Library | 352.02 | 408.81 | 7549.17 | 640.17 | 1159.41 | 191.17 | 3.89 | 83.32 | 12.80 |
| t825217 | Library | 896.00 | 99.61 | 8324.30 | 752.13 | 1358.31 | 182.96 | 8.47 | 78.69 | 12.84 |
| t825189 | Library | 665.84 | 72.27 | 6137.93 | 540.08 | 925.34 | 94.78 | 8.61 | 79.41 | 11.97 |
| t825341 | Library | 5629.23 | 628.81 | 27017.35 | 1851.79 | 5247.27 | 821.35 | 14.86 | 71.30 | 13.85 |
| t825248 | Library | 4371.65 | 505.92 | 23631.90 | 2696.59 | 2698.49 | 349.03 | 14.24 | 76.97 | 8.79 |
| t824773 | Library | 3506.09 | 835.78 | 19269.98 | 4532.02 | 2227.50 | 553.55 | 14.02 | 77.07 | 8.91 |
| t825766 | Library | 4432.91 | 198.33 | 22012.97 | 1246.86 | 2799.67 | 246.27 | 15.16 | 75.27 | 9.57 |
| t824918 | Library | 4571.46 | 333.10 | 15654.02 | 1056.73 | 2198.08 | 290.49 | 20.39 | 69.81 | 9.80 |
| t825034 | Library | 3964.61 | 70.35 | 24085.85 | 841.58 | 3249.53 | 90.91 | 12.67 | 76.95 | 10.38 |
| t824932 | Library | 3447.25 | 296.25 | 0.00 | 0.00 | 9301.63 | 954.05 | 27.04 | 0.00 | 72.96 |
| t824618 | Library | 2234.07 | 165.27 | 0.00 | 0.00 | 14836.06 | 1103.65 | 13.09 | 0.00 | 86.91 |
| t825126 | Library | 4436.97 | 363.60 | 25188.19 | 1480.74 | 3284.76 | 456.69 | 13.48 | 76.54 | 9.98 |
| t825910 | Library | 4249.71 | 584.70 | 0.00 | 0.00 | 8490.14 | 920.00 | 33.36 | 0.00 | 66.64 |
| t824688 | Library | 4228.74 | 231.67 | 20597.69 | 1231.62 | 2619.74 | 187.23 | 15.41 | 75.05 | 9.55 |
| t824996 | Library | 3855.66 | 537.82 | 0.00 | 0.00 | 9165.52 | 1200.54 | 29.61 | 0.00 | 70.39 |
| t825528 | Library | 3692.70 | 1227.13 | 0.00 | 0.00 | 11358.95 | 5291.80 | 24.53 | 0.00 | 75.47 |
| t825154 | Library | 3780.39 | 504.36 | 19468.96 | 1850.65 | 1891.65 | 81.10 | 15.04 | 77.44 | 7.52 |
| t825930 | Library | 3974.90 | 225.37 | 20267.81 | 2083.54 | 2280.36 | 226.71 | 14.99 | 76.42 | 8.60 |
| t825043 | Library | 3769.89 | 133.82 | 0.00 | 0.00 | 8797.72 | 165.86 | 30.00 | 0.00 | 70.00 |
| t824807 | Library | 3357.53 | 468.33 | 17960.57 | 2948.48 | 1955.35 | 304.15 | 14.43 | 77.17 | 8.40 |
| t825978 | Library | 3729.92 | 259.78 | 0.00 | 0.00 | 7803.92 | 372.79 | 32.34 | 0.00 | 67.66 |
| t825277 | Library | 5074.27 | 210.87 | 22201.95 | 1240.95 | 2353.52 | 143.70 | 17.13 | 74.93 | 7.94 |
| t824498 | Library | 4275.89 | 465.24 | 0.00 | 0.00 | 10427.31 | 1145.45 | 29.08 | 0.00 | 70.92 |
| t824603 | Library | 4379.66 | 1065.39 | 24174.72 | 4819.93 | 3318.99 | 605.21 | 13.74 | 75.85 | 10.41 |
| t826076 | Library | 2441.37 | 305.28 | 14634.39 | 1941.64 | 2008.75 | 203.43 | 12.79 | 76.68 | 10.53 |
| t825259 | Library | 3573.58 | 375.88 | 0.00 | 0.00 | 8531.40 | 591.48 | 29.52 | 0.00 | 70.48 |
| t825936 | Library | 4032.17 | 413.09 | 19537.02 | 1670.61 | 2194.60 | 102.06 | 15.65 | 75.83 | 8.52 |
| t825077 | Library | 2155.17 | 1730.32 | 0.00 | 0.00 | 2484.33 | 1708.76 | 46.45 | 0.00 | 53.55 |
| t825123 | Library | 7599.87 | 641.42 | 24191.10 | 2744.83 | 1412.40 | 270.25 | 22.89 | 72.86 | 4.25 |
| t825215 | Library | 9326.54 | 1215.67 | 26027.12 | 3050.69 | 1614.25 | 169.10 | 25.23 | 70.40 | 4.37 |
| t825585 | Library | 6037.88 | 556.91 | 21641.94 | 3482.09 | 1914.74 | 272.64 | 20.40 | 73.13 | 6.47 |
| t825012 | Library | 9497.41 | 988.11 | 19473.00 | 1861.66 | 1190.75 | 138.92 | 31.49 | 64.56 | 3.95 |
| t825773 | Library | 5019.73 | 5801.69 | 14028.58 | 16230.64 | 957.05 | 1127.09 | 25.09 | 70.12 | 4.78 |
| t824786 | Library | 9465.74 | 630.83 | 18332.26 | 823.19 | 1083.78 | 138.77 | 32.77 | 63.47 | 3.75 |
| t826099 | Library | 8536.43 | 1555.22 | 21164.31 | 3491.54 | 1111.91 | 279.26 | 27.70 | 68.69 | 3.61 |
| t824942 | Library | 9637.56 | 676.86 | 19367.38 | 593.59 | 1298.29 | 110.39 | 31.80 | 63.91 | 4.28 |
| t826070 | Library | 1838.10 | 126.64 | 11332.79 | 241.75 | 1578.81 | 159.43 | 12.46 | 76.83 | 10.70 |
| t824626 | Library | 9628.53 | 1087.07 | 19550.88 | 1922.42 | 1192.07 | 311.35 | 31.70 | 64.37 | 3.92 |
| t825269 | Library | 5195.17 | 1035.20 | 0.00 | 0.00 | 11747.76 | 1893.18 | 30.66 | 0.00 | 69.34 |
| t824654 | Library | 10432.93 | 261.81 | 21619.69 | 1050.85 | 1441.42 | 158.82 | 31.15 | 64.55 | 4.30 |
| t824746 | Library | 7720.20 | 2333.22 | 14717.67 | 4287.31 | 1053.73 | 339.36 | 32.86 | 62.65 | 4.49 |
| t825877 | Library | 9079.32 | 1219.31 | 25746.05 | 2523.07 | 1796.26 | 380.23 | 24.79 | 70.30 | 4.90 |
| t825841 | Library | 9197.24 | 1630.34 | 26974.43 | 4380.52 | 1777.75 | 490.26 | 24.24 | 71.08 | 4.68 |
| t824646 | Library | 9300.69 | 513.73 | 18821.50 | 596.45 | 1053.66 | 105.90 | 31.88 | 64.51 | 3.61 |
| t824659 | Library | 9748.50 | 680.11 | 22599.41 | 1678.38 | 1422.74 | 94.41 | 28.87 | 66.92 | 4.21 |
| t824540 | Library | 10207.46 | 895.68 | 19756.69 | 1652.76 | 1193.12 | 107.16 | 32.76 | 63.41 | 3.83 |
| t825933 | Library | 10623.28 | 958.55 | 19771.76 | 1412.32 | 1246.88 | 62.35 | 33.57 | 62.49 | 3.94 |
| t826097 | Library | 10415.16 | 2359.49 | 25830.80 | 5187.66 | 1676.74 | 558.04 | 27.46 | 68.11 | 4.42 |
| t824571 | Library | 10440.61 | 565.69 | 21058.96 | 1248.13 | 1343.30 | 135.18 | 31.79 | 64.12 | 4.09 |
| t825593 | Library | 11126.13 | 926.97 | 29681.63 | 1998.42 | 2115.17 | 298.99 | 25.92 | 69.15 | 4.93 |
| t825108 | Library | 7653.41 | 4744.76 | 28652.01 | 18264.79 | 0.00 | 0.00 | 21.08 | 78.92 | 0.00 |
| t825724 | Library | 7323.44 | 879.24 | 21225.76 | 2526.53 | 1057.24 | 266.61 | 24.74 | 71.69 | 3.57 |
| t824539 | Library | 9337.12 | 521.90 | 25355.87 | 1416.98 | 1666.36 | 72.96 | 25.68 | 69.74 | 4.58 |
| t824653 | Library | 8863.94 | 644.52 | 23029.83 | 1556.13 | 1317.44 | 110.41 | 26.69 | 69.34 | 3.97 |
| t825833 | Library | 8616.50 | 721.13 | 24316.58 | 2124.16 | 1890.45 | 116.27 | 24.74 | 69.83 | 5.43 |
| t825739 | Library | 7727.89 | 315.61 | 21730.09 | 527.57 | 1205.07 | 63.69 | 25.20 | 70.87 | 3.93 |
| t825907 | Library | 7929.94 | 274.23 | 19593.35 | 656.53 | 1007.51 | 58.18 | 27.79 | 68.67 | 3.53 |
| t824625 | Library | 8673.34 | 1029.55 | 23513.35 | 2629.04 | 1266.23 | 270.65 | 25.93 | 70.29 | 3.79 |
| t825889 | Library | 11115.46 | 1097.61 | 29414.81 | 4085.37 | 2189.43 | 647.47 | 26.02 | 68.86 | 5.13 |
| t824612 | Library | 9185.88 | 869.54 | 23932.43 | 2376.27 | 1385.84 | 167.59 | 26.62 | 69.36 | 4.02 |
| t825862 | Library | 14078.06 | 531.57 | 37241.92 | 4595.35 | 3141.00 | 783.77 | 25.85 | 68.38 | 5.77 |
| t825935 | Library | 8044.61 | 523.74 | 19961.33 | 1594.94 | 993.67 | 59.53 | 27.74 | 68.83 | 3.43 |
| t825105 | Library | 13147.81 | 15198.18 | 0.00 | 0.00 | 0.00 | 0.00 | 100.00 | 0.00 | 0.00 |
| t825301 | Library | 19582.25 | 22626.33 | 0.00 | 0.00 | 0.00 | 0.00 | 100.00 | 0.00 | 0.00 |
| t825377 | Library | 36474.30 | 2088.63 | 0.00 | 0.00 | 0.00 | 0.00 | 100.00 | 0.00 | 0.00 |
| t825092 | Library | 16862.83 | 19491.28 | 0.00 | 0.00 | 0.00 | 0.00 | 100.00 | 0.00 | 0.00 |
| t825075 | Library | 11794.34 | 16616.26 | 0.00 | 0.00 | 0.00 | 0.00 | 100.00 | 0.00 | 0.00 |
| t825213 | Library | 42405.35 | 3783.51 | 106.19 | 123.94 | 0.00 | 0.00 | 99.75 | 0.25 | 0.00 |
| t824771 | Library | 26382.43 | 1302.16 | 0.00 | 0.00 | 0.00 | 0.00 | 100.00 | 0.00 | 0.00 |
| t825025 | Library | 34244.09 | 2738.57 | 0.00 | 0.00 | 0.00 | 0.00 | 100.00 | 0.00 | 0.00 |
| t825090 | Library | 19213.63 | 22768.12 | 0.00 | 0.00 | 0.00 | 0.00 | 100.00 | 0.00 | 0.00 |
| t826284 | Library | 23696.59 | 7236.48 | 0.00 | 0.00 | 0.00 | 0.00 | 100.00 | 0.00 | 0.00 |
| t825024 | Library | 22920.29 | 3593.27 | 0.00 | 0.00 | 0.00 | 0.00 | 100.00 | 0.00 | 0.00 |
| t825015 | Library | 19634.76 | 14603.34 | 0.00 | 0.00 | 0.00 | 0.00 | 100.00 | 0.00 | 0.00 |
| t824526 | Library | 30875.70 | 1665.38 | 0.00 | 0.00 | 0.00 | 0.00 | 100.00 | 0.00 | 0.00 |
| t824647 | Library | 33029.61 | 1333.89 | 32.01 | 64.01 | 0.00 | 0.00 | 99.90 | 0.10 | 0.00 |
| t825007 | Library | 27135.4 | 5339.70 | 0.00 | 0.00 | 0.00 | 0.00 | 100.00 | 0.00 | 0.00 |
| t825501 | Library | 34961.69 | 3138.17 | 0.00 | 0.00 | 0.00 | 0.00 | 100.00 | 0.00 | 0.00 |
| t825219 | Library | 35322.67 | 1961.90 | 0.00 | 0.00 | 0.00 | 0.00 | 100.00 | 0.00 | 0.00 |
| t825286 | Library | 34322.20 | 7206.21 | 0.00 | 0.00 | 0.00 | 0.00 | 100.00 | 0.00 | 0.00 |
| t825071 | Library | 25250.80 | 5267.38 | 0.00 | 0.00 | 0.00 | 0.00 | 100.00 | 0.00 | 0.00 |
| t825047 | Library | 29104.28 | 693.89 | 0.00 | 0.00 | 0.00 | 0.00 | 100.00 | 0.00 | 0.00 |
| t825031 | Library | 28420.36 | 4191.07 | 0.00 | 0.00 | 0.00 | 0.00 | 100.00 | 0.00 | 0.00 |
| t825633 | Library | 25500.80 | 1946.60 | 50.30 | 100.59 | 0.00 | 0.00 | 99.80 | 0.20 | 0.00 |
| t824861 | Library | 28384.900 | 1197.54 | 0.00 | 0.00 | 0.00 | 0.00 | 100.00 | 0.00 | 0.00 |
| t824928 | Library | 30530.55 | 2056.23 | 219.07 | 42.26 | 0.00 | 0.00 | 99.29 | 0.71 | 0.00 |
| t825725 | Library | 29979.43 | 3470.58 | 0.00 | 0.00 | 423.01 | 846.01 | 98.61 | 0.00 | 1.39 |
| t826036 | Library | 26987.28 | 2239.20 | 0.00 | 0.00 | 0.00 | 0.00 | 100.00 | 0.00 | 0.00 |
| t824903 | Library | 28246.56 | 2612.35 | 32.84 | 65.68 | 0.00 | 0.00 | 99.88 | 0.12 | 0.00 |
| t824845 | Library | 23246.37 | 6435.16 | 0.00 | 0.00 | 0.00 | 0.00 | 100.00 | 0.00 | 0.00 |
| t825078 | Library | 24598.30 | 8324.67 | 160.67 | 210.74 | 395.87 | 791.74 | 97.79 | 0.64 | 1.57 |
| t826030 | Library | 28584.94 | 4128.51 | 0.00 | 0.00 | 0.00 | 0.00 | 100.00 | 0.00 | 0.00 |
| t824622 | Library | 34261.87 | 3389.90 | 35.28 | 70.56 | 0.00 | 0.00 | 99.90 | 0.10 | 0.00 |
| t825141 | Library | 27482.09 | 4075.99 | 0.00 | 0.00 | 0.00 | 0.00 | 100.00 | 0.00 | 0.00 |
| t825379 | Library | 48037.63 | 6303.86 | 177.77 | 140.94 | 730.79 | 1461.57 | 98.14 | 0.36 | 1.49 |
| t825625 | Library | 32685.23 | 2612.03 | 0.00 | 0.00 | 0.00 | 0.00 | 100.00 | 0.00 | 0.00 |
| t825309 | Library | 34810.24 | 4108.46 | 36.73 | 73.46 | 0.00 | 0.00 | 99.89 | 0.11 | 0.00 |
| t824930 | Library | 25828.33 | 604.78 | 0.00 | 0.00 | 0.00 | 0.00 | 100.00 | 0.00 | 0.00 |
| t824937 | Library | 27567.91 | 1462.49 | 215.12 | 7.12 | 0.00 | 0.00 | 99.23 | 0.77 | 0.00 |
| t825151 | Library | 37767.14 | 4072.38 | 47.87 | 95.73 | 0.00 | 0.00 | 99.87 | 0.13 | 0.00 |
| t825708 | Library | 27634.38 | 1409.03 | 0.00 | 0.00 | 0.00 | 0.00 | 100.00 | 0.00 | 0.00 |
| t825119 | Library | 26504.59 | 8311.25 | 0.00 | 0.00 | 0.00 | 0.00 | 100.00 | 0.00 | 0.00 |
| t825009 | Library | 27036.30 | 7746.65 | 0.00 | 0.00 | 0.00 | 0.00 | 100.00 | 0.00 | 0.00 |
| t825109 | Library | 33149.60 | 6509.72 | 0.00 | 0.00 | 0.00 | 0.00 | 100.00 | 0.00 | 0.00 |
| t825273 | Library | 29577.96 | 1023.05 | 32.29 | 64.58 | 0.00 | 0.00 | 99.89 | 0.11 | 0.00 |
| t825023 | Library | 31656.21 | 949.42 | 0.00 | 0.00 | 0.00 | 0.00 | 100.00 | 0.00 | 0.00 |
| t826237 | Library | 27902.45 | 1341.04 | 0.00 | 0.00 | 0.00 | 0.00 | 100.00 | 0.00 | 0.00 |
| t824663 | Library | 26987.01 | 5838.71 | 36.59 | 73.17 | 0.00 | 0.00 | 99.86 | 0.14 | 0.00 |
| t826137 | Library | 24139.22 | 4414.79 | 0.00 | 0.00 | 0.00 | 0.00 | 100.00 | 0.00 | 0.00 |
| t826100 | Library | 36962.29 | 1755.86 | 108.33 | 131.42 | 669.79 | 773.48 | 97.94 | 0.29 | 1.77 |
| t825129 | Library | 38487.37 | 6157.27 | 82.36 | 95.57 | 0.00 | 0.00 | 99.79 | 0.21 | 0.00 |
| t825297 | Library | 37859.38 | 2886.17 | 38.69 | 77.38 | 0.00 | 0.00 | 99.90 | 0.10 | 0.00 |
| t825057 | Library | 23954.88 | 16177.90 | 0.00 | 0.00 | 0.00 | 0.00 | 100.00 | 0.00 | 0.00 |
| t825029 | Library | 31780.71 | 1429.73 | 0.00 | 0.00 | 0.00 | 0.00 | 100.00 | 0.00 | 0.00 |
| t825059 | Library | 26880.58 | 10409.12 | 0.00 | 0.00 | 0.00 | 0.00 | 100.00 | 0.00 | 0.00 |
| t824990 | Library | 37070.20 | 1503.42 | 0.00 | 0.00 | 0.00 | 0.00 | 100.00 | 0.00 | 0.00 |
| t825013 | Library | 32494.40 | 2849.71 | 0.00 | 0.00 | 0.00 | 0.00 | 100.00 | 0.00 | 0.00 |
| t825087 | Library | 27234.02 | 8671.51 | 0.00 | 0.00 | 0.00 | 0.00 | 100.00 | 0.00 | 0.00 |
| t825101 | Library | 23648.49 | 2058.43 | 0.00 | 0.00 | 0.00 | 0.00 | 100.00 | 0.00 | 0.00 |
| t825103 | Library | 24958.25 | 18727.48 | 0.00 | 0.00 | 0.00 | 0.00 | 100.00 | 0.00 | 0.00 |
| t825049 | Library | 43708.91 | 4062.54 | 0.00 | 0.00 | 0.00 | 0.00 | 100.00 | 0.00 | 0.00 |
| t826280 | Library | 33920.91 | 5572.79 | 21.71 | 43.41 | 507.42 | 1014.85 | 98.46 | 0.06 | 1.47 |
| t826278 | Library | 31879.47 | 9925.12 | 0.00 | 0.00 | 0.00 | 0.00 | 100.00 | 0.00 | 0.00 |
| t825621 | Library | 34723.77 | 3274.99 | 0.00 | 0.00 | 0.00 | 0.00 | 100.00 | 0.00 | 0.00 |
| t826208 | Library | 18457.17 | 12780.64 | 0.00 | 0.00 | 0.00 | 0.00 | 100.00 | 0.00 | 0.00 |
| t825086 | Library | 43598.62 | 5155.48 | 0.00 | 0.00 | 0.00 | 0.00 | 100.00 | 0.00 | 0.00 |
| t825058 | Library | 48071.51 | 8507.37 | 0.00 | 0.00 | 0.00 | 0.00 | 100.00 | 0.00 | 0.00 |
| t826279 | Library | 39910.99 | 1936.63 | 0.00 | 0.00 | 429.32 | 858.63 | 98.94 | 0.00 | 1.06 |
| t825084 | Library | 32568.21 | 14809.65 | 0.00 | 0.00 | 0.00 | 0.00 | 100.00 | 0.00 | 0.00 |
| t826132 | Library | 35281.0 | 4178.20 | 37.75 | 75.50 | 0.00 | 0.00 | 99.89 | 0.11 | 0.00 |
| t825263 | Library | 26069.15 | 6019.54 | 0.00 | 0.00 | 0.00 | 0.00 | 100.00 | 0.00 | 0.00 |
| t825221 | Library | 33289.84 | 2352.64 | 40.50 | 81.00 | 0.00 | 0.00 | 99.88 | 0.12 | 0.00 |
| t825099 | Library | 32649.38 | 1539.67 | 0.00 | 0.00 | 0.00 | 0.00 | 100.00 | 0.00 | 0.00 |
| t825085 | Library | 42734.57 | 9999.19 | 0.00 | 0.00 | 0.00 | 0.00 | 100.00 | 0.00 | 0.00 |
| t825496 | Library | 33924.06 | 1916.82 | 0.00 | 0.00 | 0.00 | 0.00 | 100.00 | 0.00 | 0.00 |
| t825914 | Library | 25327.08 | 1447.87 | 0.00 | 0.00 | 0.00 | 0.00 | 100.00 | 0.00 | 0.00 |
| t826054 | Library | 28715.87 | 1053.97 | 0.00 | 0.00 | 0.00 | 0.00 | 100.00 | 0.00 | 0.00 |

### Example 5: Screen to Improve Functional Expression of Additional Terminal Synthases

[0597] To further improve functional expression of TSs identified in the Examples presented above, a library of approximately 1324 candidate TSs was designed using three different strategies: (1) recombination of single mutations from Example 3; (2) recombination of mutations enriched in top designs from Example 4; and (3) structure informed single mutations.

[0598] (1) Recombination of single mutations: Variant abundance data were derived from a site-scanning library on candidate Terminal Synthases from Example 3. The variant abundance was determined in a multiplexed assay wherein synthetic TS polypeptides were expressed as genetic fusions to Aga2 on the cell surface. The per-cell abundance of the TS-Aga2 fusions were determined by labeling with fluorescently conjugated antibodies specific for a terminal Myc epitope. Cells were isolated based on this fluorescence at a single-cell level. Variants that were brighter were assumed to be able to be expressed at a high level, due to some combination of increased thermal and colloidal stability. The relative brightnesses were quantified and summarized as a final computed enrichment score. Additional single mutations were derived from a position-specific scoring matrix which scores amino acids at each position as either being present more or less often within a larger multiple sequence alignment than one would expect by chance. Finally, mutations harbored by single mutant TS candidates from Example 3 that were at least 2-fold more active than their control were also used. Mutations from these three sources were recombined to produce a total of 365 protein sequences.

[0599] (2) Recombination of top designs from Example 4: Several engineered TS candidates from Example 4 demonstrated significant improvements in activity relative to wild type controls. The mutations harbored by the top quartile of TS candidates, based upon THCA titer, were recombined to find the best combinations of mutants. The mutations harbored by the top quartile of TS candidates, based upon CBDA titer, were recombined to generate all possible combinations. Mutations from this design strategy produced a total of 363 protein sequences.

[0600] (3) Structure informed single mutations: C. sativa THCAS and CBDAS are structurally similar enzymes which share ˜85% sequence identity and differentially cyclize the same substrate, CBGA, to yield their respective products. Whether CBGA is converted to THCA or CBDA is speculated to depend on the target of a nucleophilic attack by a catalytic base within the active pocket of the terminal synthase enzyme (Shoyama et al. (2012) JMB 423(1):96-105 and Taura et al. (2007) FEBS Letters 581(16):2929-2934). In the case of THCA formation, the catalytic base is believed to be facilitated by Y484 which deprotonates O6′ of CBGA. In the case of CBDA formation, the catalytic base is less well characterized but structural and sequence similarities with THCAS suggest that it may be Y483. Mutations within the presumed inner shell of CBDAS (e.g., <8 Å from the catalytic residues) and within the presumed outer shell of the THCAS (e.g., >30 Å from the catalytic residues) were generated. Mutations from this design strategy produced a total of 573 protein sequences.

[0601] The TS candidate genes were recoded in silico for expression in S. cerevisiae and synthesized in the integrative yeast expression vector shown in FIG. 5. Each candidate enzyme expression construct was transformed into a S. cerevisiae CEN.PK strain that also expressed a prenyltransferase enzyme capable of catalyzing reaction R4 in FIG. 2. Strain 865977, expressing a THCAS candidate from Example 4 (corresponding to strain t826279 in Example 4), was included in the library screen as a positive control for THCAS activity. Strain 865859, expressing a CBDAS candidate from Example 4 (corresponding to strain t824625 in Example 4), was included in the library screen as a positive control for CBDAS activity. Strains 876606 and 876607 expressing C. sativa THCAS (Uniprot Accession: I1V0C5) and C. saliva CBDAS (Uniprot Accession ID: A6P6V9) were included as positive controls, but were not used to establish hit ranking. All candidate enzymes in the library, and positive controls, were expressed with an N-terminal MFalpha2 signal peptide (SEQ ID NO: 16) and a C-terminal HDEL signal peptide (SEQ ID NO: 17). A methionine residue was also added at the amino terminus of SEQ ID NO: 16.

[0602] A terminal product assay was conducted as described in Example 4.

[0603] Strains engineered to produce THCA were normalized to the in-plate performance of strain 865977. 113 candidate TSs demonstrated a normalized THCA titer more than 2-fold greater than strain 865977 and over 4-fold greater than the wild type C. sativa THCAS harbored by strain 876606 (FIG. 15, Tables 16A-16B). 16 strains demonstrated THCA titers more than 4-fold greater than strain 865977 (FIG. 15, Tables 16A-16B), including: strain 924468, which expresses a TS that includes amino acid substitutions R31Q, A47T, H56N, Q58S, M61S, I74T, N90V, H143E, A250P, S255V, V288L, T340E, F345L, E424D, Q475K, and T492N relative to SEQ ID NO: 14; strain 924725, which expresses a TS that includes amino acid substitutions R31Q, H56N, Q58S, M61S, I74T, N90V, H143E, A250P, S255V, V288L, T340E, F345L, E424D, Q475K, and T492N relative to SEQ ID NO: 14; strain 924717, which expresses a TS that includes amino acid substitutions R31Q, A47T, V52L, H56N, Q58S, M61S, I74T, N90V, H143E, A250P, S255V, V288L, T340E, F345L, Q475K, and T492N relative to SEQ ID NO: 14; strain 924387, which expresses a TS that includes amino acid substitutions A47T, H56N, Q58S, M61S, I74T, N90V, A250D, S255V, F345L, Q475K, and T492N relative to SEQ ID NO: 14; strain 924472, which expresses a TS that includes amino acid substitutions R31Q, A47T, H56N, Q58S, M61S, I74T, N90V, H143E, A250P, S255V, V288L, T340E, F345L, Q475K, and T492N relative to SEQ ID NO: 14: strain 924487, which expresses a TS that includes amino acid substitutions R31Q, A47T, H56N, Q58S, M61S, I74T, N90V, A250P, S255V, T340E, F345L, E424D, Q475K, and T492N relative to SEQ ID NO: 14; strain 923862, which expresses a TS that includes amino acid substitutions R31Q, A47T, H56N, Q58S, M61S, I74T, N90V, H143E, A250P, S255V, T340E, F345L, Q475K, and T492N relative to SEQ ID NO: 14; strain 923908, which expresses a TS that includes amino acid substitutions R31Q, V52L, H56N, Q58S, M61S, I74T, N90V, A250P, S255V, V288L, F345L, Q475K, and T492N relative to SEQ ID NO: 14, strain 924276, which expresses a TS that includes amino acid substitutions A47T, H56N, Q58S, M61S, I74T, N90V, A250D, S255V, F345L, E424D, Q475K, and T492N relative to SEQ ID NO: 14; strain 924433, which expresses a TS that includes amino acid substitutions R31Q, H56N, Q58S, M61S, I74T, N90V, A250P, S255V, V288L, F345L, E424D, Q475K, and T492N relative to SEQ ID NO: 14; strain 923880, which expresses a TS that includes amino acid substitutions H56N, Q58S, M61S, I74T, N90V, H143E, A250D, S255V, V288L, F345L, Q475K, T492N, and A495E relative to SEQ ID NO: 14, strain 923609, which expresses a TS that includes amino acid substitutions H56N, Q58S, M61S, I74T, N90V, H143E, A250D, S255V, V288L, F345L, Q475K, and T492N relative to SEQ ID NO: 14; strain 924428, which expresses a TS that includes amino acid substitutions R31Q, A47T, H56N, Q58S, M61S, I74T, N90V, A250P, S255V, V288L, T340E, F345L, Q475K, and T492N relative to SEQ ID NO: 14; strain 924364, which expresses a TS that includes amino acid substitutions R31Q, H56N, Q58S, M61S, I74T, N90V, H143E, A250P, S255V, V288L, Q475K, and T492N relative to SEQ ID NO: 14; strain 924555, which expresses a TS that includes amino acid substitutions A47T, H56N, Q58S, M61S, I74T, N90V, A250D, S255V, V288L, F345L, Q475K, and T492N relative to SEQ ID NO: 14; and strain 924214, which expresses a TS that includes amino acid substitutions R31Q, V52I, H56N, M61S, I74T, N90V, A250P, S255V, F345L, Q475K, and T492N, relative to SEQ ID NO: 14.

[0604] Likewise, strains engineered to produce CBDA were normalized to the in-plate performance of strain 865859. 128 candidate terminal synthases demonstrated a normalized CBDA titers more than 0.5-fold greater than strain 865859 and over 2-fold greater than the wild type C. sativa CBDAS harbored by strain 876607 (FIG. 16, Tables 16A-16B). 10 candidate terminal synthases demonstrated a normalized CBDA titers more than 2-fold greater than strain 865859 (FIG. 16, Tables 16A-16B), including: strain 924940, which expresses a TS that includes amino acid substitutions K50N, G95A, N196K, H213N, T339E, Q343E, L344M, and A414V, relative to SEQ ID NO: 13; strain 924748, which expresses a TS that includes amino acid substitutions G95A, Y175F, T339E, Q343E, and A414V relative to SEQ ID NO: 13; strain 924744, which expresses a TS that includes amino acid substitutions G95A, S116A, T339E, Q343E, A414V, and N527D relative to SEQ ID NO: 13; strain 924928, which expresses a TS that includes amino acid substitutions G95A, E150Q, V162I, C180G, N196K, N211D, N273H, T339E, Q343E, and A414V relative to SEQ ID NO: 13; strain 924747, which expresses a TS that includes amino acid substitutions G95A, T339E, Q343E, Q376V, and A414V relative to SEQ ID NO: 13; strain 924765, which expresses a TS that includes amino acid substitutions K50N, G95A, S100A, E150Q, V162I, C180G, N196K, N211D, H213N, S322E, T339E, Q343E, L344M, A414V, E452T, and I504Q relative to SEQ ID NO: 13; strain 923811, which expresses a TS that includes amino acid substitutions G95A, N196K, T339E, Q343E, and A414V relative to SEQ ID NO: 13; strain 924716, which expresses a TS that includes amino acid substitutions 50N, G95A, V103H, H213N, T339E, Q343E, L344M, and A414V relative to SEQ ID NO: 13, strain 924764, which expresses a TS that includes amino acid substitutions G95A, T339E, Q343E, Q376R, and A414V relative to SEQ ID NO: 13; and strain 924957, which expresses a TS that includes amino acid substitutions K50N, H213N, L230I, T339E, Q343E, and L344M relative to SEQ ID NO: 13.

[0605] Surprisingly, 44 candidate TSs produced greater than 10 mg/L CBCA (FIG. 17, Table 16A). 19 strains demonstrated mean CBCA titers greater than 15 mg/L CBCA (FIG. 17, Table 16A), including: strain 923976, which expresses a TS that includes amino acid substitutions R31Q, H56N, Q58S, I74T, N90V, A250P, S255V, V288L, F345L, Q475K, and T492N relative to SEQ ID NO: 14; strain 923759 which expresses a TS that includes amino acid substitutions R31Q, V52I, H56N, Q58S, M61S, 174T, N90V, A250P, S255V, F345L, Q475K, and T492N relative to SEQ ID NO: 14; strain 923624, which expresses a TS that includes amino acid substitutions R31Q, H56N, I74T, N90V, H143E, A250P, S255V, Q475K, and T492N relative to SEQ ID NO: 14; strain 923980, which expresses a TS that includes amino acid substitutions R31Q, H56N, I74T, N90V, A250P, S255V, L443L, Q475K, and T492N relative to SEQ ID NO: 14; strain 923922, which expresses a TS that includes amino acid substitutions H56N, M61S, N90V, A250D, S255V, V288L, Q475K, T492N, and A495E relative to SEQ ID NO: 14; strain 923890, which expresses a TS that includes amino acid substitutions R31Q, H56N, I74T, N90V, K215R, A250P, S255V, Q475K, and T492N relative to SEQ ID NO: 14; strain 923616, which expresses a TS that includes amino acid substitutions R31Q, P49A, H56N, Q58S, M61S, I74T, N90V, H143E, A250P, S255V, V288L, F345L, Q475K, and T492N relative to SEQ ID NO: 14; strain 923954, which expresses a TS that includes amino acid substitutions R31Q, A47T, H56N, 174T, N90V, A250P, S255V, Q475K, and T492N relative to SEQ ID NO: 14; strain 923894, which expresses a TS that includes amino acid substitutions M61S, N90V, A250D, S255V, Q475K, T492N, A495E, and N498T relative to SEQ ID NO: 14; strain 923972, which expresses a TS that includes amino acid substitutions R31Q, H56N, M61S, I74T, N89H, N90V, S100A, H136R, E150Q, N196K, N21 ID, A250P, S255V, V288M, F345M, S382K, L443I, Q475K, and T492N relative to SEQ ID NO: 14, strain 923680, which expresses a TS that includes amino acid substitutions R31Q, H56N, Q58S, M61S, I74T, N90V, H143E, A250P, S255V, V288L, T340E, F345L, E424D, Q475K, and T492N relative to SEQ ID NO: 14; strain 923918, which expresses a TS that includes amino acid substitutions R31Q, H56N, I74T, S88L, N90V, A250P, S255V, Q475K, and T492N relative to SEQ ID NO: 14; strain 924465, which expresses a TS that includes amino acid substitutions R31Q, V52I, H56N, Q58S, M61S, I74T, N90V, H143E, A250P, S255V, V288L, F345L, Q475K, and T492N relative to SEQ ID NO: 14; strain 924725, which expresses a TS that includes amino acid substitutions R31Q, H56N, Q58S, M61S, I74T, N90V, H143E, A250P, S255V, V288L, T340E, F345L, E424D, Q475K, and T492N relative to SEQ ID NO: 14; strain 924927, which expresses a TS that includes amino acid substitutions R31Q, H56N, Q58S, M61S, I74T, N90V, H143E, A250P, S255V, V288L, F345L, A411V, Q475K, and T492N relative to SEQ ID NO: 14; strain 923908, which expresses a TS that includes amino acid substitutions R31Q, V52I, H56N, Q58S, M61S, 174T, N90V, A250P, S255V, V288L, F345L, Q475K, and T492N relative to SEQ ID NO: 14; strain 923613, which expresses a TS that includes amino acid substitutions R31Q, K50L, H56N, 174T, N90V, A250P, S255V, Q475K, and T492N relative to SEQ ID NO: 14; strain 924717, which expresses a TS that includes amino acid substitutions R311Q, A47T, V52I, H56N, Q58S, M61S, I74T, N90V, H143E, A250P, S255V, V288L, T340E, F345L, Q475K, and T492N relative to SEQ ID NO: 14; and strain 924309, which expresses a TS that includes amino acid substitutions R3Q, H56N, M61 S, I74T, N89K, N90V, S100A, N196K, N21 ID, A250P, S255V, I257R, V288K, F345M, S382K, L443I, Q475K, and T492N relative to SEQ ID NO: 14.

[0606] These putative CBCA synthases sample a mutagenic space different from the CBCASs discovered in Example 4. Of note are the differences in the terminal cannabinoid profile among the CBCASs discovered in Example 4 versus Example 5. CBCAS candidates in Example 4 range in their production of CBCA as a percentage of all terminal cannabinoids (Percent Product CBCA) from 41%-100% (Table 16B). The CBCAS candidates identified in Example 5 have a much lower Percent Product CBCA ceiling of ˜41% with most of the remaining terminal cannabinoid being THCA.

TABLE 16A
Terminal C6 Product Titers of terminal synthase candidate enzymes in S. cerevisiae

| | | Mean | Std. Dev. | Mean | Std. Dev. | Mean | Std. Dev. |
|---|---|---|---|---|---|---|---|
| Strain | Strain | THCA | THCA | CBDA | CBDA | CBCA | CBCA |
| ID | type | (ug/L) | (ug/L) | (ug/L) | (ug/L) | (ug/L) | (ug/L) |
| 865859 | Positive | 10960.03 | 3961.90 | 54379.21 | 17362.47 | 1119.84 | 1169.95 |
| | Control | | | | | | |
| | CBDAS; | | | | | | |
| | based on | | | | | | |
| | strain | | | | | | |
| | t824625 | | | | | | |
| 865977 | Positive | 69335.57 | 25212.66 | 296.53 | 452.42 | 1712.90 | 6412.00 |
| | Control | | | | | | |
| | THCAS; | | | | | | |
| | based on | | | | | | |
| | strain | | | | | | |
| | t826279 | | | | | | |
| 876606 | Positive | 27869.52 | 8869.33 | 31.59 | 110.72 | 292.40 | 1899.82 |
| | Control C. | | | | | | |
| | sativa | | | | | | |
| | THCAS; | | | | | | |
| | based on | | | | | | |
| | UniProt | | | | | | |
| | I1V0C5 | | | | | | |
| 876607 | Positive | 71.69 | 326.35 | 13918.31 | 5245.82 | 0.00 | 0.00 |
| | Control C. | | | | | | |
| | sativa | | | | | | |
| | CBDAS; | | | | | | |
| | based on | | | | | | |
| | UniProt | | | | | | |
| | A6P6V9 | | | | | | |
| 923976 | Library | 156121.76 | 12265.89 | 2559.20 | 286.41 | 109062.59 | 8376.65 |
| 923759 | Library | 246025.73 | 2402.28 | 2154.87 | 111.39 | 85403.83 | 120779.26 |
| 923624 | Library | 74450.99 | 25925.53 | 0.00 | 0.00 | 51011.97 | 16627.75 |
| 923980 | Library | 121465.20 | 3173.64 | 0.00 | 0.00 | 42136.81 | 59590.44 |
| 923922 | Library | 100765.19 | 5633.88 | 0.00 | 0.00 | 40096.22 | 49976.29 |
| 923890 | Library | 91086.74 | 21315.68 | 0.00 | 0.00 | 39060.50 | 51371.56 |
| 923616 | Library | 92067.89 | 11779.85 | 777.05 | 1098.92 | 35149.78 | 49709.29 |
| 923954 | Library | 91607.09 | 13725.96 | 0.00 | 0.00 | 35076.40 | 49605.51 |
| 923894 | Library | 38860.32 | 10099.45 | 0.00 | 0.00 | 27104.40 | 7102.31 |
| 923972 | Library | 208221.97 | 5504.13 | 6632.23 | 9379.39 | 26121.64 | 1828.41 |
| 923680 | Library | 53651.56 | 24133.34 | 801.09 | 1132.92 | 24905.01 | 35221.00 |
| 923918 | Library | 50798.54 | 4431.08 | 0.00 | 0.00 | 19067.12 | 26964.97 |
| 924465 | Library | 323258.56 | 26945.63 | 8745.60 | 2312.97 | 17412.81 | 3551.62 |
| 924725 | Library | 302090.05 | 14758.62 | 0.00 | 0.00 | 17196.57 | 933.03 |
| 924927 | Library | 339221.99 | 206303.90 | 0.00 | 0.00 | 16961.29 | 12391.95 |
| 923908 | Library | 346728.33 | 29157.39 | 11394.56 | 1416.99 | 16623.43 | 2075.56 |
| 923613 | Library | 45458.31 | 2777.77 | 0.00 | 0.00 | 16495.90 | 23328.73 |
| 924717 | Library | 292410.73 | 13874.18 | 0.00 | 0.00 | 16352.13 | 1070.95 |
| 924309 | Library | 125449.34 | 26809.34 | 10414.57 | 2109.80 | 15165.28 | 3338.02 |
| 923795 | Library | 38761.72 | 3212.69 | 0.00 | 0.00 | 14370.29 | 20322.66 |
| 923880 | Library | 327559.34 | 27290.70 | 6964.48 | 1380.10 | 14003.99 | 66.43 |
| 924364 | Library | 247423.14 | 11335.68 | 0.00 | 0.00 | 13670.82 | 1628.64 |
| 924612 | Library | 167155.67 | 4014.44 | 2298.50 | 35.92 | 13387.46 | 1053.61 |
| 924164 | Library | 124711.67 | 22662.76 | 10312.50 | 1531.43 | 13357.87 | 1950.04 |
| 924803 | Library | 119942.36 | 12957.62 | 990.59 | 1400.91 | 13343.29 | 1559.62 |
| 924559 | Library | 258202.68 | 138648.49 | 4792.07 | 822.39 | 13332.48 | 6613.94 |
| 924468 | Library | 289705.26 | 1444.03 | 12424.30 | 1703.18 | 12697.91 | 664.15 |
| 923884 | Library | 299245.18 | 17516.02 | 9892.51 | 282.51 | 12286.15 | 567.50 |
| 924276 | Library | 305035.31 | 20778.60 | 6199.77 | 151.56 | 11894.07 | 769.56 |
| 924665 | Library | 220936.32 | 64.50 | 0.00 | 0.00 | 11643.67 | 227.30 |
| 924691 | Library | 100660.20 | 134333.96 | 7818.24 | 11056.66 | 11104.60 | 15704.28 |
| 924639 | Library | 213286.80 | 97209.63 | 0.00 | 0.00 | 11055.19 | 5728.00 |
| 924512 | Library | 205682.79 | 10942.27 | 0.00 | 0.00 | 10958.14 | 561.66 |
| 924723 | Library | 205435.71 | 73246.40 | 0.00 | 0.00 | 10847.24 | 3628.06 |
| 923916 | Library | 245176.11 | 56508.17 | 6353.58 | 331.86 | 10753.81 | 1654.16 |
| 924428 | Library | 292915.18 | 46930.71 | 8451.23 | 334.93 | 10751.30 | 960.93 |
| 924472 | Library | 258707.40 | 20598.47 | 11099.61 | 139.41 | 10718.63 | 904.88 |
| 924609 | Library | 229160.52 | 86663.44 | 6622.19 | 1988.65 | 10580.20 | 4220.16 |
| 924657 | Library | 167982.82 | 11013.84 | 4565.30 | 65.97 | 10577.94 | 1522.02 |
| 924226 | Library | 271920.73 | 8419.39 | 5764.58 | 195.52 | 10566.22 | 1408.69 |
| 924306 | Library | 228730.09 | 3601.22 | 5203.83 | 87.56 | 10376.79 | 178.82 |
| 924695 | Library | 188428.21 | 14909.77 | 1570.26 | 5.30 | 10367.04 | 1012.67 |
| 924162 | Library | 226940.48 | 41720.64 | 7062.23 | 658.80 | 10225.71 | 3305.83 |
| 924387 | Library | 291971.64 | 8022.80 | 2382.16 | 120.83 | 10120.14 | 7.83 |
| 924667 | Library | 204155.15 | 21481.18 | 833.72 | 1179.06 | 9937.41 | 109.38 |
| 924425 | Library | 247763.95 | 63650.93 | 2283.06 | 563.13 | 9861.03 | 2744.76 |
| 924373 | Library | 191906.35 | 38935.19 | 1600.93 | 414.33 | 9830.90 | 1996.65 |
| 924212 | Library | 208865.32 | 69097.39 | 7242.75 | 1384.86 | 9807.60 | 4564.90 |
| 924635 | Library | 188844.02 | 6440.26 | 754.95 | 1067.66 | 9677.64 | 498.24 |
| 923912 | Library | 259314.75 | 22186.21 | 6958.28 | 54.90 | 9630.34 | 283.93 |
| 924304 | Library | 174922.40 | 243443.38 | 5739.65 | 8117.09 | 9553.59 | 13510.82 |
| 924028 | Library | 220273.46 | 191081.98 | 5823.00 | 5044.07 | 9433.43 | 8435.23 |
| 924426 | Library | 214079.45 | 185427.99 | 7728.56 | 6693.44 | 9245.77 | 8007.07 |
| 924160 | Library | 232558.30 | 2846.86 | 4849.52 | 281.81 | 9213.45 | 704.58 |
| 924424 | Library | 261208.24 | 19462.00 | 4507.90 | 129.95 | 9159.50 | 357.16 |
| 924431 | Library | 193529.35 | 37851.70 | 1821.91 | 421.69 | 8749.91 | 3139.18 |
| 924518 | Library | 216777.27 | 7567.35 | 2090.68 | 19.27 | 8632.60 | 183.69 |
| 923771 | Library | 323899.31 | 15568.39 | 1530.93 | 45.24 | 8573.42 | 804.94 |
| 923744 | Library | 276525.30 | 53975.12 | 5521.55 | 7808.65 | 8565.97 | 12114.11 |
| 924673 | Library | 144011.90 | 10356.74 | 0.00 | 0.00 | 8510.89 | 511.60 |
| 924398 | Library | 186606.55 | 163118.80 | 5348.47 | 4655.40 | 8501.03 | 7502.16 |
| 923948 | Library | 191135.66 | 23926.72 | 6174.72 | 516.68 | 8088.62 | 251.05 |
| 924062 | Library | 211238.45 | 48282.27 | 3873.45 | 409.00 | 7879.27 | 1531.65 |
| 923854 | Library | 162453.92 | 21857.68 | 5658.93 | 393.53 | 7871.12 | 473.94 |
| 923866 | Library | 141628.82 | 40321.68 | 4660.54 | 488.97 | 7717.51 | 2133.50 |
| 924645 | Library | 141648.77 | 21424.79 | 0.00 | 0.00 | 7376.18 | 2298.00 |
| 924649 | Library | 151580.59 | 45575.37 | 1090.82 | 299.97 | 7306.08 | 2078.08 |
| 923862 | Library | 209204.14 | 31225.39 | 3861.74 | 473.93 | 7280.19 | 822.12 |
| 924699 | Library | 148892.96 | 23157.90 | 0.00 | 0.00 | 7110.37 | 1081.80 |
| 924417 | Library | 151083.45 | 29342.93 | 1241.90 | 209.31 | 7004.79 | 495.30 |
| 924158 | Library | 209345.43 | 10454.44 | 4257.06 | 726.87 | 6934.64 | 631.05 |
| 923840 | Library | 174683.40 | 19391.32 | 3572.33 | 509.52 | 6876.76 | 886.61 |
| 923758 | Library | 145418.95 | 57553.10 | 5071.22 | 843.87 | 6840.99 | 2572.47 |
| 924719 | Library | 146068.50 | 19636.04 | 618.35 | 874.48 | 6826.34 | 788.19 |
| 924006 | Library | 189416.51 | 165132.62 | 5217.50 | 4527.21 | 6820.83 | 5910.11 |
| 924412 | Library | 195323.10 | 169219.33 | 4249.33 | 3691.43 | 6730.76 | 5829.49 |
| 924030 | Library | 178736.88 | 64076.70 | 2038.22 | 2882.48 | 6479.01 | 1812.50 |
| 924094 | Library | 188068.39 | 2330.96 | 3779.20 | 528.18 | 6459.52 | 699.12 |
| 924484 | Library | 159280.39 | 138551.56 | 5717.71 | 5011.47 | 6421.18 | 5605.67 |
| 924715 | Library | 125804.53 | 6613.14 | 0.00 | 0.00 | 6367.93 | 392.61 |
| 924576 | Library | 152154.76 | 11318.28 | 0.00 | 0.00 | 5891.04 | 531.59 |
| 924332 | Library | 144177.87 | 6454.12 | 3895.97 | 42.66 | 5833.44 | 207.35 |
| 924298 | Library | 160138.96 | 29655.26 | 3699.42 | 302.97 | 5660.25 | 562.07 |
| 924083 | Library | 217583.17 | 1486.77 | 1000.00 | 39.41 | 5623.26 | 186.33 |
| 924847 | Library | 217580.17 | 31871.05 | 6218.30 | 1078.95 | 5583.54 | 7896.32 |
| 924322 | Library | 288217.00 | 37468.18 | 8605.61 | 922.19 | 5499.29 | 7777.17 |
| 923811 | Library | 26641.51 | 9095.10 | 112727.53 | 27884.39 | 5443.54 | 1815.02 |
| 924707 | Library | 145605.92 | 43995.29 | 571.07 | 807.62 | 5431.56 | 623.45 |
| 924928 | Library | 32819.54 | 1624.43 | 107007.35 | 3934.89 | 5422.86 | 222.16 |
| 923848 | Library | 163629.18 | 51188.16 | 1571.77 | 2222.82 | 5391.12 | 2510.02 |
| 924266 | Library | 142442.09 | 24415.61 | 3307.49 | 0.28 | 5101.92 | 922.02 |
| 924661 | Library | 171514.73 | 19945.41 | 4302.42 | 758.79 | 4937.92 | 6983.27 |
| 924744 | Library | 19386.71 | 9073.00 | 56584.25 | 29855.81 | 4830.55 | 2949.83 |
| 924748 | Library | 15134.45 | 1189.07 | 66017.48 | 2294.99 | 4746.15 | 321.31 |
| 924828 | Library | 22525.99 | 4823.05 | 105742.32 | 20757.40 | 4612.11 | 1013.49 |
| 924492 | Library | 128800.63 | 19944.04 | 2307.33 | 238.46 | 4610.81 | 871.22 |
| 923695 | Library | 10378.27 | 97.26 | 42573.49 | 1473.10 | 4325.13 | 154.21 |
| 924932 | Library | 4006.46 | 2622.40 | 59884.77 | 29657.99 | 4201.31 | 2661.28 |
| 924446 | Library | 120067.03 | 109487.93 | 3128.32 | 2897.46 | 4200.80 | 3832.20 |
| 924348 | Library | 178267.94 | 37594.62 | 0.00 | 0.00 | 4186.63 | 5920.79 |
| 923786 | Library | 16627.11 | 201.62 | 40451.84 | 511.21 | 4061.00 | 241.84 |
| 924942 | Library | 2255.78 | 244.41 | 8942.86 | 572.33 | 4048.80 | 356.14 |
| 923960 | Library | 16410.92 | 3245.89 | 69267.79 | 1457.61 | 4043.56 | 744.71 |
| 924284 | Library | 21246.14 | 3298.50 | 91910.11 | 9211.85 | 3992.13 | 15.65 |
| 924502 | Library | 116614.01 | 24040.28 | 2177.13 | 488.39 | 3920.97 | 1479.93 |
| 923727 | Library | 8726.51 | 379.04 | 42966.45 | 1559.05 | 3892.30 | 186.73 |
| 924413 | Library | 24584.70 | 13004.62 | 103952.64 | 69718.49 | 3815.33 | 5395.69 |
| 924406 | Library | 105857.33 | 16443.31 | 989.48 | 1399.33 | 3716.50 | 706.10 |
| 924843 | Library | 22873.18 | 7051.32 | 86422.92 | 20608.95 | 3682.70 | 1384.92 |
| 924965 | Library | 19838.97 | 4568.87 | 57232.27 | 13286.44 | 3611.82 | 737.12 |
| 924864 | Library | 20898.87 | 6914.90 | 72009.96 | 21429.59 | 3502.55 | 1232.46 |
| 924940 | Library | 20619.74 | 3393.10 | 70128.26 | 10145.52 | 3386.07 | 679.19 |
| 923653 | Library | 7811.67 | 519.03 | 29363.67 | 2673.75 | 3347.14 | 642.22 |
| 923780 | Library | 200806.27 | 109422.29 | 4642.63 | 2067.01 | 3181.38 | 4499.15 |
| 923850 | Library | 2975.69 | 323.40 | 58344.98 | 6494.13 | 3139.06 | 152.49 |
| 923957 | Library | 16208.39 | 3558.88 | 70960.44 | 13965.88 | 2934.22 | 889.74 |
| 924836 | Library | 18336.57 | 15485.48 | 59766.12 | 43781.15 | 2896.55 | 4096.34 |
| 924642 | Library | 18179.53 | 6818.09 | 68334.78 | 15322.57 | 2880.71 | 640.93 |
| 924888 | Library | 3896.65 | 1022.21 | 60525.56 | 11422.11 | 2842.22 | 877.10 |
| 923910 | Library | 2623.20 | 247.23 | 56789.62 | 5066.97 | 2839.55 | 204.19 |
| 924618 | Library | 3244.66 | 3113.77 | 51680.12 | 48164.54 | 2739.45 | 2736.62 |
| 923896 | Library | 10828.69 | 15314.08 | 43198.07 | 61091.29 | 2730.93 | 3862.11 |
| 924760 | Library | 13383.48 | 401.49 | 61885.19 | 1211.31 | 2719.94 | 82.26 |
| 923899 | Library | 8061.46 | 2194.93 | 33292.87 | 4984.45 | 2659.66 | 887.64 |
| 924436 | Library | 149036.78 | 33430.96 | 2210.59 | 399.01 | 2634.74 | 3726.08 |
| 924890 | Library | 3701.39 | 219.49 | 63516.40 | 1356.07 | 2621.40 | 248.14 |
| 924240 | Library | 113456.82 | 163.07 | 0.00 | 0.00 | 2564.29 | 3626.45 |
| 924108 | Library | 4037.10 | 757.81 | 67461.46 | 12656.19 | 2540.32 | 571.21 |
| 924586 | Library | 250149.27 | 94025.70 | 1797.95 | 1557.31 | 2535.55 | 4391.71 |
| 924114 | Library | 4377.79 | 2115.93 | 45678.55 | 2980.23 | 2487.42 | 263.04 |
| 924051 | Library | 20151.52 | 995.90 | 93992.93 | 13561.97 | 2453.51 | 30.44 |
| 924765 | Library | 15014.48 | 776.47 | 42255.34 | 4104.24 | 2356.13 | 157.16 |
| 924801 | Library | 19848.37 | 13607.25 | 77605.22 | 57082.26 | 2263.18 | 3200.62 |
| 924264 | Library | 11453.67 | 3248.04 | 54038.49 | 10175.79 | 2248.23 | 453.47 |
| 923611 | Library | 11367.88 | 4061.75 | 43366.66 | 8924.48 | 2227.86 | 435.26 |
| 924640 | Library | 10808.98 | 8330.93 | 45323.48 | 30496.52 | 2135.33 | 1701.18 |
| 924747 | Library | 11661.08 | 3422.91 | 42644.35 | 14036.11 | 2091.24 | 651.81 |
| 924912 | Library | 9721.93 | 443.70 | 26344.36 | 993.87 | 2086.42 | 63.42 |
| 924767 | Library | 3011.51 | 4258.92 | 67936.30 | 60817.88 | 2049.86 | 2898.94 |
| 924524 | Library | 175383.63 | 104116.79 | 857.37 | 1212.50 | 1994.41 | 2820.52 |
| 924381 | Library | 12368.29 | 622.14 | 53395.15 | 14066.35 | 1973.97 | 264.44 |
| 924946 | Library | 7181.67 | 1372.03 | 20102.62 | 155.80 | 1901.03 | 1.27 |
| 924945 | Library | 2522.85 | 973.75 | 7246.77 | 2791.38 | 1896.45 | 688.02 |
| 924764 | Library | 8591.86 | 723.69 | 32645.88 | 1165.59 | 1828.40 | 123.76 |
| 924378 | Library | 10735.00 | 4082.09 | 32360.69 | 11228.57 | 1751.48 | 726.49 |
| 865957 | Library | 9341.86 | 518.06 | 39441.13 | 2674.35 | 1593.90 | 149.06 |
| 924716 | Library | 10414.59 | 2059.53 | 33697.39 | 4894.31 | 1590.67 | 333.41 |
| 924528 | Library | 17317.75 | 2231.86 | 65458.30 | 1979.12 | 1527.75 | 2160.56 |
| 923805 | Library | 5336.20 | 229.09 | 36817.63 | 1404.64 | 1476.25 | 5.04 |
| 924856 | Library | 2713.25 | 1726.12 | 56942.31 | 33375.02 | 1471.68 | 2081.27 |
| 923765 | Library | 11473.14 | 2075.13 | 57927.65 | 2591.21 | 1438.78 | 225.56 |
| 924112 | Library | 3946.74 | 5581.53 | 55603.81 | 39343.20 | 1393.66 | 1970.93 |
| 924253 | Library | 11286.69 | 4365.21 | 53666.00 | 2662.62 | 1351.28 | 1910.99 |
| 924246 | Library | 11314.51 | 3084.16 | 50886.96 | 15471.34 | 1332.44 | 1884.36 |
| 923672 | Library | 8977.54 | 2516.32 | 30635.58 | 9078.73 | 1322.83 | 406.46 |
| 924957 | Library | 1922.64 | 480.41 | 30921.30 | 5078.30 | 1283.90 | 368.76 |
| 924497 | Library | 7298.39 | 713.32 | 29283.96 | 2894.55 | 1272.30 | 143.34 |
| 923818 | Library | 9488.77 | 4484.81 | 48477.07 | 12851.12 | 1258.97 | 434.25 |
| 923807 | Library | 7156.69 | 1274.12 | 36798.09 | 102.96 | 1210.20 | 1711.49 |
| 924909 | Library | 10405.39 | 3428.74 | 50774.61 | 13056.61 | 1161.57 | 1642.71 |
| 923942 | Library | 1060.50 | 1499.78 | 35882.34 | 10776.51 | 1137.06 | 1608.04 |
| 924745 | Library | 7515.13 | 3563.10 | 25309.39 | 9023.09 | 1132.19 | 542.60 |
| 924131 | Library | 7808.78 | 3370.21 | 36057.68 | 12398.62 | 1121.68 | 379.85 |
| 924110 | Library | 1533.46 | 2168.64 | 46517.40 | 7959.31 | 1077.67 | 1524.05 |
| 924227 | Library | 0.00 | 0.00 | 26963.69 | 4050.19 | 1072.40 | 1516.61 |
| 924978 | Library | 6924.10 | 185.40 | 22577.89 | 740.86 | 1034.73 | 4.06 |
| 923657 | Library | 7548.42 | 1494.26 | 47546.48 | 3212.52 | 1033.49 | 144.57 |
| 924139 | Library | 1018.72 | 7.23 | 28464.76 | 238.28 | 1007.48 | 3.59 |
| 924688 | Library | 6065.57 | 2554.09 | 21581.49 | 7491.21 | 1001.90 | 408.61 |
| 924400 | Library | 7143.98 | 57.27 | 32550.65 | 1472.94 | 954.76 | 9.16 |
| 923726 | Library | 4512.32 | 1032.85 | 48798.98 | 3199.41 | 904.28 | 1278.84 |
| 924898 | Library | 0.00 | 0.00 | 9112.00 | 4159.12 | 889.47 | 323.58 |
| 923697 | Library | 7204.75 | 9013.27 | 35973.07 | 46750.56 | 839.93 | 1187.83 |
| 924969 | Library | 8329.31 | 2359.99 | 28656.83 | 6120.74 | 817.76 | 1156.49 |
| 923723 | Library | 4815.55 | 477.13 | 34719.27 | 4516.27 | 769.16 | 37.46 |
| 924167 | Library | 3076.17 | 2476.89 | 35760.69 | 1015.93 | 675.00 | 954.59 |
| 924660 | Library | 2365.55 | 1705.05 | 41801.18 | 29413.86 | 645.33 | 1290.67 |
| 923675 | Library | 5159.63 | 3797.88 | 27367.31 | 16021.65 | 622.98 | 881.03 |
| 924766 | Library | 12267.14 | 2282.32 | 52810.16 | 9379.68 | 578.92 | 1002.72 |
| 924261 | Library | 1532.60 | 3065.20 | 27254.65 | 32409.81 | 575.35 | 1150.70 |
| 924962 | Library | 5159.23 | 2171.15 | 19730.72 | 7310.86 | 502.52 | 710.67 |
| 924743 | Library | 4808.91 | 1146.99 | 17528.12 | 4721.24 | 418.14 | 591.34 |
| 924900 | Library | 3059.80 | 86.65 | 8998.25 | 307.50 | 398.36 | 563.36 |
| 924384 | Library | 7547.12 | 5042.83 | 30747.75 | 21685.56 | 379.88 | 759.76 |
| 924622 | Library | 5319.00 | 2630.02 | 11419.11 | 3856.85 | 325.23 | 650.46 |
| 924604 | Library | 414.80 | 829.60 | 20410.83 | 10410.89 | 280.46 | 560.93 |
| 924433 | Library | 430995.73 | 36695.66 | 4284.47 | 122.90 | 0.00 | 0.00 |
| 924487 | Library | 401026.29 | 63023.41 | 3075.52 | 450.49 | 0.00 | 0.00 |
| 924548 | Library | 365124.38 | 117135.37 | 3488.79 | 915.39 | 0.00 | 0.00 |
| 924829 | Library | 324182.74 | 27933.28 | 2064.03 | 128.12 | 0.00 | 0.00 |
| 924835 | Library | 298372.62 | 27271.36 | 869.74 | 1229.99 | 0.00 | 0.00 |
| 924851 | Library | 294348.43 | 9926.58 | 4879.82 | 115.45 | 0.00 | 0.00 |
| 924555 | Library | 294060.71 | 20117.07 | 8708.25 | 643.35 | 0.00 | 0.00 |
| 923609 | Library | 282714.54 | 68795.57 | 0.00 | 0.00 | 0.00 | 0.00 |
| 924552 | Library | 279763.40 | 10839.70 | 2114.17 | 84.16 | 0.00 | 0.00 |
| 924683 | Library | 271117.01 | 48148.66 | 4529.98 | 908.85 | 0.00 | 0.00 |
| 924455 | Library | 254534.28 | 155976.55 | 1316.64 | 1862.02 | 0.00 | 0.00 |
| 924587 | Library | 234962.20 | 167.38 | 7276.34 | 379.81 | 0.00 | 0.00 |
| 924580 | Library | 233927.11 | 224028.48 | 2208.55 | 2185.30 | 0.00 | 0.00 |
| 924811 | Library | 230432.89 | 1724.05 | 1379.80 | 145.74 | 0.00 | 0.00 |
| 924855 | Library | 228608.15 | 15644.17 | 673.69 | 952.74 | 0.00 | 0.00 |
| 924218 | Library | 226224.56 | 84423.25 | 6461.18 | 2791.48 | 0.00 | 0.00 |
| 924214 | Library | 216983.50 | 37021.79 | 5090.58 | 734.80 | 0.00 | 0.00 |
| 924459 | Library | 216127.95 | 6790.04 | 2040.12 | 167.87 | 0.00 | 0.00 |
| 924520 | Library | 214973.13 | 293604.37 | 1873.08 | 2648.94 | 0.00 | 0.00 |
| 924346 | Library | 211486.66 | 1276.33 | 4404.74 | 156.97 | 0.00 | 0.00 |
| 923784 | Library | 198602.92 | 172006.67 | 3189.08 | 2764.01 | 0.00 | 0.00 |
| 924681 | Library | 195073.71 | | 1436.61 | | 0.00 | |
| 924585 | Library | 185168.35 | 107032.48 | 3082.36 | 1896.19 | 0.00 | 0.00 |
| 924522 | Library | 175962.87 | 48850.64 | 763.64 | 1079.95 | 0.00 | 0.00 |
| 924262 | Library | 175386.42 | 14122.77 | 3625.15 | 132.34 | 0.00 | 0.00 |
| 924693 | Library | 173644.31 | 67898.01 | 2315.44 | 763.60 | 0.00 | 0.00 |
| 924686 | Library | 170785.53 | 15851.96 | 1454.22 | 206.30 | 0.00 | 0.00 |
| 924583 | Library | 155402.97 | 99318.93 | 2190.27 | 1128.01 | 0.00 | 0.00 |
| 924595 | Library | 154197.84 | 108543.73 | 3402.88 | 2227.33 | 0.00 | 0.00 |
| 924867 | Library | 12187.37 | 955.28 | 44660.13 | 5231.35 | 0.00 | 0.00 |
| 924407 | Library | 10661.73 | | 52587.25 | | 0.00 | |
| 924352 | Library | 8154.51 | 5780.53 | 38228.82 | 21075.56 | 0.00 | 0.00 |
| 923928 | Library | 7823.27 | 362.71 | 42638.93 | 3643.80 | 0.00 | 0.00 |
| 923647 | Library | 7733.74 | 2779.99 | 38088.66 | 10881.98 | 0.00 | 0.00 |
| 924808 | Library | 7719.31 | 1119.16 | 38166.94 | 875.50 | 0.00 | 0.00 |
| 924500 | Library | 7625.27 | 1680.07 | 43355.58 | 8035.93 | 0.00 | 0.00 |
| 923917 | Library | 7503.97 | 960.47 | 34185.42 | 5596.98 | 0.00 | 0.00 |
| 923694 | Library | 7485.64 | 711.92 | 41799.49 | 8127.03 | 0.00 | 0.00 |
| 923924 | Library | 6904.45 | 3022.57 | 38431.85 | 13720.88 | 0.00 | 0.00 |
| 923610 | Library | 6804.19 | 2593.47 | 40862.43 | 16332.21 | 0.00 | 0.00 |
| 923851 | Library | 6684.07 | 362.65 | 34201.15 | 584.86 | 0.00 | 0.00 |
| 923679 | Library | 6627.09 | 2934.60 | 36281.96 | 13776.09 | 0.00 | 0.00 |
| 923806 | Library | 6621.06 | 54.51 | 29425.87 | 3951.47 | 0.00 | 0.00 |
| 923603 | Library | 6480.64 | 1671.41 | 33241.91 | 2174.66 | 0.00 | 0.00 |
| 923870 | Library | 6271.39 | 220.19 | 35402.17 | 1658.19 | 0.00 | 0.00 |
| 923836 | Library | 5830.25 | 1115.66 | 24933.50 | 5014.90 | 0.00 | 0.00 |
| 923935 | Library | 5598.95 | 1929.11 | 29095.63 | 8813.97 | 0.00 | 0.00 |
| 923946 | Library | 5388.59 | 1337.33 | 28487.59 | 2199.89 | 0.00 | 0.00 |
| 923617 | Library | 4246.87 | 73.64 | 27179.49 | 988.73 | 0.00 | 0.00 |
| 924979 | Library | 3227.29 | 214.40 | 12558.33 | 626.81 | 0.00 | 0.00 |
| 924920 | Library | 3207.79 | 151.61 | 10970.07 | 897.15 | 0.00 | 0.00 |
| 924960 | Library | 3010.63 | 582.61 | 11081.72 | 2710.55 | 0.00 | 0.00 |
| 924684 | Library | 2701.20 | 400.87 | 8836.56 | 843.45 | 0.00 | 0.00 |
| 924908 | Library | 2498.30 | 131.37 | 11608.96 | 1721.00 | 0.00 | 0.00 |
| 924652 | Library | 2090.85 | 102.19 | 7211.25 | 107.23 | 0.00 | 0.00 |
| 924778 | Library | 1595.92 | 24.36 | 35350.64 | 928.52 | 0.00 | 0.00 |
| 924800 | Library | 1259.61 | 1781.36 | 37017.45 | 18808.93 | 0.00 | 0.00 |
| 923978 | Library | 1010.74 | 1429.41 | 34018.82 | 3615.96 | 0.00 | 0.00 |
| 924812 | Library | 485.71 | 686.90 | 7670.80 | 1029.75 | 0.00 | 0.00 |
| 923953 | Library | 0.00 | 0.00 | 26226.92 | 2662.12 | 0.00 | 0.00 |
| 923955 | Library | 0.00 | 0.00 | 28579.54 | 2078.92 | 0.00 | 0.00 |
| 923974 | Library | 0.00 | 0.00 | 36616.89 | 432.55 | 0.00 | 0.00 |
| 924746 | Library | 0.00 | 0.00 | 14713.52 | 2056.79 | 0.00 | 0.00 |
| 924910 | Library | 0.00 | 0.00 | 8994.34 | 1423.24 | 0.00 | 0.00 |
| 924922 | Library | 0.00 | 0.00 | 22921.59 | 4575.63 | 0.00 | 0.00 |
| 924929 | Library | 0.00 | 0.00 | 13879.23 | 3834.36 | 0.00 | 0.00 |
| 924961 | Library | 0.00 | 0.00 | 8092.36 | 2467.09 | 0.00 | 0.00 |
| 924972 | Library | 0.00 | 0.00 | 10150.46 | 685.25 | 0.00 | 0.00 |
| 924973 | Library | 0.00 | 0.00 | 6970.13 | 1056.22 | 0.00 | 0.00 |
| 924977 | Library | 0.00 | 0.00 | 8814.39 | 1239.69 | 0.00 | 0.00 |

TABLE 16B
Percent Terminal C6 Product Titers of terminal
synthase candidate enzymes in S. cerevisiae

| | Fold difference | Fold difference | | | |
|---|---|---|---|---|---|
| | over Average | over Average | | | |
| Strain | THCA from | CBDA from | % | % | % |
| ID | strain t865977 | strain t865859 | THCA | CBDA | CBCA |
| 865859 | | 1.02 | 16.49 | 81.82 | 1.69 |
| 865977 | 0.95 | | 97.18 | 0.42 | 2.40 |
| 876606 | 0.39 | | 98.85 | 0.11 | 1.04 |
| 876607 | | 0.25 | 0.51 | 99.49 | 0.00 |
| 923976 | 2.34 | | 58.31 | 0.96 | 40.73 |
| 923759 | 3.69 | | 73.75 | 0.65 | 25.60 |
| 923624 | | | 59.34 | 0.00 | 40.66 |
| 923980 | | | 74.24 | 0.00 | 25.76 |
| 923922 | | | 71.53 | 0.00 | 28.47 |
| 923890 | | | 69.99 | 0.00 | 30.01 |
| 923616 | | | 71.93 | 0.61 | 27.46 |
| 923954 | | | 72.31 | 0.00 | 27.69 |
| 923894 | | | 58.91 | 0.00 | 41.09 |
| 923972 | 3.13 | | 86.41 | 2.75 | 10.84 |
| 923680 | | | 67.61 | 1.01 | 31.38 |
| 923918 | | | 72.71 | 0.00 | 27.29 |
| 924465 | 3.96 | | 92.51 | 2.50 | 4.98 |
| 924725 | 5.16 | | 94.61 | 0.00 | 5.39 |
| 924927 | 2.97 | | 95.24 | 0.00 | 4.76 |
| 923908 | 4.58 | | 92.52 | 3.04 | 4.44 |
| 923613 | | | 73.37 | 0.00 | 26.63 |
| 924717 | 5.00 | | 94.70 | 0.00 | 5.30 |
| 924309 | | | 83.06 | 6.90 | 10.04 |
| 923795 | | | 72.95 | 0.00 | 27.05 |
| 923880 | 4.32 | | 93.98 | 2.00 | 4.02 |
| 924364 | 4.23 | | 94.76 | 0.00 | 5.24 |
| 924612 | | | 91.42 | 1.26 | 7.32 |
| 924164 | | | 84.05 | 6.95 | 9.00 |
| 924803 | | | 89.33 | 0.74 | 9.94 |
| 924559 | 3.56 | | 93.44 | 1.73 | 4.82 |
| 924468 | 5.55 | | 92.02 | 3.95 | 4.03 |
| 923884 | 3.95 | | 93.10 | 3.08 | 3.82 |
| 924276 | 4.57 | | 94.40 | 1.92 | 3.68 |
| 924665 | 3.40 | | 94.99 | 0.00 | 5.01 |
| 924691 | | | 84.18 | 6.54 | 9.29 |
| 924639 | 3.28 | | 95.07 | 0.00 | 4.93 |
| 924512 | 3.52 | | 94.94 | 0.00 | 5.06 |
| 924723 | 3.51 | | 94.98 | 0.00 | 5.02 |
| 923916 | 3.24 | | 93.48 | 2.42 | 4.10 |
| 924428 | 4.24 | | 93.85 | 2.71 | 3.44 |
| 924472 | 4.95 | | 92.22 | 3.96 | 3.82 |
| 924609 | 3.22 | | 93.02 | 2.69 | 4.29 |
| 924657 | 2.31 | | 91.73 | 2.49 | 5.78 |
| 924226 | 3.93 | | 94.33 | 2.00 | 3.67 |
| 924306 | 3.42 | | 93.62 | 2.13 | 4.25 |
| 924695 | 3.22 | | 94.04 | 0.78 | 5.17 |
| 924162 | 3.28 | | 92.92 | 2.89 | 4.19 |
| 924387 | 4.99 | | 95.89 | 0.78 | 3.32 |
| 924667 | 3.14 | | 94.99 | 0.39 | 4.62 |
| 924425 | 2.96 | | 95.33 | 0.88 | 3.79 |
| 924373 | 2.95 | | 94.38 | 0.79 | 4.83 |
| 924212 | 3.91 | | 92.45 | 3.21 | 4.34 |
| 924635 | 2.91 | | 94.76 | 0.38 | 4.86 |
| 923912 | 3.42 | | 93.99 | 2.52 | 3.49 |
| 924304 | 2.62 | | 91.96 | 3.02 | 5.02 |
| 924028 | 2.60 | | 93.52 | 2.47 | 4.01 |
| 924426 | 3.10 | | 92.65 | 3.34 | 4.00 |
| 924160 | 3.36 | | 94.30 | 1.97 | 3.74 |
| 924424 | 3.78 | | 95.03 | 1.64 | 3.33 |
| 924431 | 2.31 | | 94.82 | 0.89 | 4.29 |
| 924518 | 2.59 | | 95.29 | 0.92 | 3.79 |
| 923771 | 3.73 | | 96.97 | 0.46 | 2.57 |
| 923744 | 3.93 | | 95.15 | 1.90 | 2.95 |
| 924673 | 2.22 | | 94.42 | 0.00 | 5.58 |
| 924398 | 2.70 | | 93.09 | 2.67 | 4.24 |
| 923948 | 2.52 | | 93.06 | 3.01 | 3.94 |
| 924062 | 2.50 | | 94.73 | 1.74 | 3.53 |
| 923854 | 3.60 | | 92.31 | 3.22 | 4.47 |
| 923866 | 3.14 | | 91.96 | 3.03 | 5.01 |
| 924645 | 2.18 | | 95.05 | 0.00 | 4.95 |
| 924649 | 2.33 | | 94.75 | 0.68 | 4.57 |
| 923862 | 4.63 | | 94.94 | 1.75 | 3.30 |
| 924699 | 2.29 | | 95.44 | 0.00 | 4.56 |
| 924417 | 2.58 | | 94.82 | 0.78 | 4.40 |
| 924158 | 3.03 | | 94.93 | 1.93 | 3.14 |
| 923840 | 2.31 | | 94.36 | 1.93 | 3.71 |
| 923758 | 3.22 | | 92.43 | 3.22 | 4.35 |
| 924719 | 2.50 | | 95.15 | 0.40 | 4.45 |
| 924006 | 2.24 | | 94.02 | 2.59 | 3.39 |
| 924412 | 3.74 | | 94.68 | 2.06 | 3.26 |
| 924030 | 2.68 | | 95.45 | 1.09 | 3.46 |
| 924094 | 2.22 | | 94.84 | 1.91 | 3.26 |
| 924484 | 2.30 | | 92.92 | 3.34 | 3.75 |
| 924715 | 2.15 | | 95.18 | 0.00 | 4.82 |
| 924576 | 2.60 | | 96.27 | 0.00 | 3.73 |
| 924332 | 2.16 | | 93.68 | 2.53 | 3.79 |
| 924298 | 2.40 | | 94.48 | 2.18 | 3.34 |
| 924083 | 2.38 | | 97.05 | 0.45 | 2.51 |
| 924847 | 2.93 | | 94.85 | 2.71 | 2.43 |
| 924322 | 3.46 | | 95.33 | 2.85 | 1.82 |
| 923811 | | 2.52 | 18.40 | 77.84 | 3.76 |
| 924707 | 2.24 | | 96.04 | 0.38 | 3.58 |
| 924928 | | 3.58 | 22.60 | 73.67 | 3.73 |
| 923848 | 2.16 | | 95.92 | 0.92 | 3.16 |
| 924266 | 2.13 | | 94.43 | 2.19 | 3.38 |
| 924661 | 2.36 | | 94.89 | 2.38 | 2.73 |
| 924744 | | 4.15 | 23.99 | 70.03 | 5.98 |
| 924748 | | 4.85 | 17.62 | 76.86 | 5.53 |
| 924828 | | 1.57 | 16.95 | 79.58 | 3.47 |
| 924492 | 2.47 | | 94.90 | 1.70 | 3.40 |
| 923695 | | 0.76 | 18.12 | 74.33 | 7.55 |
| 924932 | | 1.27 | 5.88 | 87.95 | 6.17 |
| 924446 | 2.30 | | 94.25 | 2.46 | 3.30 |
| 924348 | 2.14 | | 97.71 | 0.00 | 2.29 |
| 923786 | | 0.85 | 27.20 | 66.16 | 6.64 |
| 924942 | | 0.66 | 14.79 | 58.65 | 26.55 |
| 923960 | | 1.20 | 18.29 | 77.20 | 4.51 |
| 924284 | | 1.42 | 18.14 | 78.46 | 3.41 |
| 924502 | 2.23 | | 95.03 | 1.77 | 3.20 |
| 923727 | | 0.76 | 15.70 | 77.30 | 7.00 |
| 924413 | | 1.62 | 18.58 | 78.54 | 2.88 |
| 924406 | 2.03 | | 95.74 | 0.89 | 3.36 |
| 924843 | | 1.84 | 20.25 | 76.49 | 3.26 |
| 924965 | | 1.22 | 24.59 | 70.93 | 4.48 |
| 924864 | | 1.53 | 21.68 | 74.69 | 3.63 |
| 924940 | | 5.15 | 21.90 | 74.50 | 3.60 |
| 923653 | | 0.60 | 19.28 | 72.46 | 8.26 |
| 923780 | 2.95 | | 96.25 | 2.23 | 1.52 |
| 923850 | | 1.07 | 4.62 | 90.51 | 4.87 |
| 923957 | | 1.45 | 17.99 | 78.75 | 3.26 |
| 924836 | | 0.89 | 22.64 | 73.79 | 3.58 |
| 924642 | | 1.36 | 20.34 | 76.44 | 3.22 |
| 924888 | | 1.29 | 5.79 | 89.98 | 4.23 |
| 923910 | | 1.04 | 4.21 | 91.22 | 4.56 |
| 924618 | | 0.80 | 5.63 | 89.62 | 4.75 |
| 923896 | | 0.75 | 19.08 | 76.11 | 4.81 |
| 924760 | | 0.92 | 17.16 | 79.35 | 3.49 |
| 923899 | | 0.68 | 18.32 | 75.64 | 6.04 |
| 924436 | 2.05 | | 96.85 | 1.44 | 1.71 |
| 924890 | | 1.35 | 5.30 | 90.95 | 3.75 |
| 924240 | 2.12 | | 97.79 | 0.00 | 2.21 |
| 924108 | | 1.16 | 5.45 | 91.12 | 3.43 |
| 924586 | 2.95 | | 98.30 | 0.71 | 1.00 |
| 924114 | | 0.79 | 8.33 | 86.93 | 4.73 |
| 924051 | | 1.85 | 17.28 | 80.61 | 2.10 |
| 924765 | | 3.10 | 25.18 | 70.87 | 3.95 |
| 924801 | | 1.02 | 19.90 | 77.83 | 2.27 |
| 924264 | | 0.84 | 16.9 | 79.77 | 3.32 |
| 923611 | | 0.77 | 19.96 | 76.13 | 3.91 |
| 924640 | | 0.90 | 18.55 | 77.78 | 3.66 |
| 924747 | | 3.13 | 20.68 | 75.62 | 3.71 |
| 924912 | | 0.56 | 25.48 | 69.05 | 5.47 |
| 924767 | | 0.93 | 4.13 | 93.07 | 2.81 |
| 924524 | 2.10 | | 98.40 | 0.48 | 1.12 |
| 924381 | | 1.07 | 18.26 | 78.83 | 2.91 |
| 924946 | | 1.48 | 24.61 | 68.88 | 6.51 |
| 924945 | | 0.53 | 21.63 | 62.12 | 16.26 |
| 924764 | | 2.40 | 19.95 | 75.80 | 4.25 |
| 924378 | | 0.64 | 23.94 | 72.16 | 3.91 |
| 865957 | | 0.71 | 18.54 | 78.29 | 3.16 |
| 924716 | | 2.47 | 22.79 | 73.73 | 3.48 |
| 924528 | | 1.02 | 20.54 | 77.65 | 1.81 |
| 923805 | | 0.72 | 12.23 | 84.39 | 3.38 |
| 924856 | | 0.78 | 4.44 | 93.15 | 2.41 |
| 923765 | | 1.18 | 16.20 | 81.77 | 2.03 |
| 924112 | | 0.97 | 6.48 | 91.24 | 2.29 |
| 924253 | | 1.03 | 17.02 | 80.94 | 2.04 |
| 924246 | | 0.85 | 17.81 | 80.09 | 2.10 |
| 923672 | | 0.64 | 21.93 | 74.84 | 3.23 |
| 924957 | | 2.27 | 5.63 | 90.60 | 3.76 |
| 924497 | | 0.58 | 19.28 | 77.36 | 3.36 |
| 923818 | | 0.98 | 16.02 | 81.85 | 2.13 |
| 923807 | | 0.79 | 15.85 | 81.47 | 2.68 |
| 924909 | | 0.56 | 16.69 | 81.45 | 1.86 |
| 923942 | | 0.66 | 2.78 | 94.23 | 2.99 |
| 924745 | | 1.86 | 22.13 | 74.53 | 3.33 |
| 924131 | | 0.66 | 17.36 | 80.15 | 2.49 |
| 924110 | | 0.81 | 3.12 | 94.69 | 2.19 |
| 924227 | | 0.52 | 0.00 | 96.17 | 3.83 |
| 924978 | | 1.66 | 22.67 | 73.94 | 3.39 |
| 923657 | | 0.92 | 13.45 | 84.71 | 1.84 |
| 924139 | | 0.56 | 3.34 | 93.35 | 3.30 |
| 924688 | | 1.58 | 21.17 | 75.33 | 3.50 |
| 924400 | | 0.65 | 17.57 | 80.08 | 2.35 |
| 923726 | | 1.18 | 8.32 | 90.01 | 1.67 |
| 924898 | | 0.67 | 0.00 | 91.11 | 8.89 |
| 923697 | | 0.73 | 16.3″ | 81.72 | 1.91 |
| 924969 | | 0.61 | 22.03 | 75.80 | 2.16 |
| 923723 | | 0.68 | 11.95 | 86.14 | 1.91 |
| 924167 | | 0.64 | 7.79 | 90.51 | 1.71 |
| 924660 | | 1.47 | 5.28 | 93.28 | 1.44 |
| 923675 | | 0.56 | 15.56 | 82.56 | 1.88 |
| 924766 | | 1.58 | 18.68 | 80.43 | 0.88 |
| 924261 | | 0.50 | 5.22 | 92.82 | 1.96 |
| 924962 | | 1.45 | 20.32 | 77.70 | 1.98 |
| 924743 | | 1.29 | 21.13 | 77.03 | 1.84 |
| 924900 | | 0.66 | 24.56 | 72.24 | 3.20 |
| 924384 | | 0.51 | 19.51 | 79.50 | 0.98 |
| 924622 | | 0.56 | 31.17 | 66.92 | 1.91 |
| 924604 | | 0.77 | 1.97 | 96.71 | 1.33 |
| 924433 | 4.54 | | 99.02 | 0.98 | 0.00 |
| 924487 | 4.80 | | 99.24 | 0.76 | 0.00 |
| 924548 | 3.84 | | 99.05 | 0.95 | 0.00 |
| 924829 | 3.59 | | 99.37 | 0.63 | 0.00 |
| 924835 | 3.30 | | 99.71 | 0.29 | 0.00 |
| 92485 | 3.96 | | 98.37 | 1.63 | 0.00 |
| 924555 | 4.13 | | 97.12 | 2.88 | 0.00 |
| 923609 | 4.24 | | 100.00 | 0.00 | 0.00 |
| 924552 | 2.95 | | 99.25 | 0.75 | 0.00 |
| 924683 | 3.73 | | 98.36 | 1.64 | 0.00 |
| 924455 | 3.04 | | 99.49 | 0.51 | 0.00 |
| 924587 | 3.30 | | 97.00 | 3.00 | 0.00 |
| 924580 | 2.46 | | 99.06 | 0.94 | 0.00 |
| 924811 | 2.55 | | 99.40 | 0.60 | 0.00 |
| 924855 | 2.53 | | 99.71 | 0.29 | 0.00 |
| 924218 | 2.72 | | 97.22 | 2.78 | 0.00 |
| 924214 | 4.06 | | 97.71 | 2.29 | 0.00 |
| 924459 | 2.58 | | 99.06 | 0.94 | 0.00 |
| 924520 | 2.57 | | 99.14 | 0.86 | 0.00 |
| 924346 | 2.54 | | 97.96 | 2.04 | 0.00 |
| 923784 | 2.92 | | 98.42 | 1.58 | 0.00 |
| 924681 | 2.33 | | 99.27 | 0.73 | 0.00 |
| 924585 | 2.60 | | 98.36 | 1.64 | 0.00 |
| 924522 | 2.10 | | 99.57 | 0.43 | 0.00 |
| 924262 | 2.11 | | 97.97 | 2.03 | 0.00 |
| 924693 | 2.39 | | 98.68 | 1.32 | 0.00 |
| 924686 | 2.12 | | 99.16 | 0.84 | 0.00 |
| 924583 | 2.18 | | 98.61 | 1.39 | 0.00 |
| 924595 | 2.12 | | 97.84 | 2.16 | 0.00 |
| 924867 | | 0.61 | 21.44 | 78.56 | 0.00 |
| 924407 | | 0.82 | 16.86 | 83.14 | 0.00 |
| 924352 | | 0.59 | 17.58 | 82.42 | 0.00 |
| 923928 | | 0.74 | 15.50 | 84.50 | 0.00 |
| 923647 | | 0.78 | 16.88 | 83.12 | 0.00 |
| 924808 | | 0.57 | 16.82 | 83.18 | 0.00 |
| 924500 | | 0.71 | 14.96 | 85.04 | 0.00 |
| 923917 | | 0.76 | 18.00 | 82.00 | 0.00 |
| 923694 | | 1.01 | 15.19 | 84.81 | 0.00 |
| 923924 | | 0.66 | 15.23 | 84.77 | 0.00 |
| 923610 | | 0.98 | 14.27 | 85.73 | 0.00 |
| 923851 | | 0.76 | 16.35 | 83.65 | 0.00 |
| 923679 | | 0.74 | 15.44 | 84.56 | 0.00 |
| 923806 | | 0.54 | 18.37 | 81.63 | 0.00 |
| 923603 | | 0.59 | 16.31 | 83.69 | 0.00 |
| 923870 | | 0.65 | 15.05 | 84.95 | 0.00 |
| 923836 | | 0.60 | 18.95 | 81.05 | 0.00 |
| 923935 | | 0.65 | 16.14 | 83.86 | 0.00 |
| 923946 | | 0.52 | 15.91 | 84.09 | 0.00 |
| 923617 | | 0.55 | 13.51 | 86.49 | 0.00 |
| 924979 | | 0.92 | 20.44 | 79.56 | 0.00 |
| 924920 | | 0.81 | 22.63 | 77.37 | 0.00 |
| 924960 | | 0.81 | 21.36 | 78.64 | 0.00 |
| 924684 | | 0.65 | 23.41 | 76.59 | 0.00 |
| 924908 | | 0.85 | 17.71 | 82.29 | 0.00 |
| 924652 | | 0.53 | 22.48 | 77.52 | 0.00 |
| 924778 | | 0.52 | 4.32 | 95.68 | 0.00 |
| 924800 | | 0.55 | 3.29 | 96.71 | 0.00 |
| 923978 | | 0.60 | 2.89 | 97.11 | 0.00 |
| 924812 | | 0.56 | 5.95 | 94.05 | 0.00 |
| 923953 | | 0.53 | 0.00 | 100.00 | 0.00 |
| 923955 | | 0.58 | 0.00 | 100.00 | 0.00 |
| 923974 | | 0.65 | 0.00 | 100.00 | 0.00 |
| 924746 | | 1.08 | 0.00 | 100.00 | 0.00 |
| 924910 | | 0.66 | 0.00 | 100.00 | 0.00 |
| 924922 | | 1.68 | 0.00 | 100.00 | 0.00 |
| 924929 | | 1.02 | 0.00 | 100.00 | 0.00 |
| 924961 | | 0.59 | 0.00 | 100.00 | 0.00 |
| 924972 | | 0.75 | 0.00 | 100.00 | 0.00 |
| 924973 | | 0.51 | 0.00 | 100.00 | 0.00 |
| 924977 | | 0.65 | 0.00 | 100.00 | 0.00 |

TABLE 17
Amino Acid Substitutions in Terminal Synthases Described in Example 3

| | Nucleic | Amino | | |
|---|---|---|---|---|
| Strain | acid SEQ | acid SEQ | Reference | Amino Acid Substitutions Relative to Reference |
| ID | ID NO: | ID NO: | Sequence | Sequence |
| 616314 | 45 | 136 | — | — |
| 701909 | 46 | 137 | SEQ ID | E424D E425K A430T L443V T446I A447C 1459L |
| | | | NO: 14 | V462I S464N V4651 T469M Q475K L489I K491I |
| | | | (UniProt: | T492N N493D H494P A495K S496N N516D K524L |
| | | | Q8GTB6) | P542R H544R |
| 701916 | 47 | 138 | SEQ ID | R31Q K40E H41Y V46P L51F V52I 163V I74T |
| | | | NO: 14 | N90V T96S V103I A116S P542L |
| | | | (UniProt: | |
| | | | Q8GTB6) | |
| 701917 | 48 | 139 | SEQ ID | E40Q N44T P46V A47T P49A F51L 152V L59F |
| | | | NO: 20 | V631 V85I S88L A95G S96T K165N F169L G173A |
| | | | (UniProt: | V181A H208Q K247R K254M G268E F273V |
| | | | I1V0C5) | K282M D284E D286E V288L M290F K296R H302Q |
| | | | | V309I G311S E344Q F345L T351I V357L F360Y |
| | | | | A363T A375G K377R T379A T395S A396V M397F |
| | | | | K399Q V409I V411A V415A E424D M440L T446I |
| | | | | A447C I459L V462I S464N V465I T469M Q475K |
| | | | | L489I K491I T492N N493D E495K S496N N516D |
| | | | | K524L A525V P542R H544R |
| 701919 | 49 | 140 | SEQ ID | V288L |
| | | | NO: 14 | |
| | | | (UniProt: | |
| | | | Q8GTB6) | |
| 701934 | 50 | 141 | SEQ ID | |
| | | | NO: 14 | |
| | | | (UniProt: | |
| | | | Q8GTB6) | |
| 701940 | 51 | 142 | SEQ ID | Q31R E40K Y41H P46V F51L I52V V63L T74I |
| | | | NO: 20 | V90N S96T K165N F169L G173A V181A H208Q |
| | | | (UniProt: | K247R K254M G268E F273V K282M D284E D286E |
| | | | I1V0C5) | V288L M290F K296R H302Q V3091 G311S E344Q |
| | | | | F345L T351I V357L F360Y A363T A375G K377R |
| | | | | T379A |
| 701964 | 52 | 143 | SEQ ID | H69Q |
| | | | NO: 13 | |
| | | | (UniProt: | |
| | | | A6P6V9) | |
| 701992 | 53 | 144 | SEQ ID | N89D |
| | | | NO: 14 | |
| | | | (UniProt: | |
| | | | Q8GTB6) | |
| 701998 | 54 | 145 | SEQ ID | R31Q K40E H41Y V46P L51F V52I I63V I74T |
| | | | NO: 14 | N90V T96S V103I A116S P542L |
| | | | (UniProt: | |
| | | | Q8GTB6) | |
| 702004 | 55 | 146 | SEQ ID | E40Q N44T P46V A47T P49A F5IL I52V L59F |
| | | | NO: 20 | V63I V85I S88L A95G S96T K165N F169L G173A |
| | | | (UniProt: | V181A H208Q K247R K254M G268E F273V |
| | | | I1V0C5) | K282M D284E D286E V288L M290F K296R H302Q |
| | | | | V309I G311S E344Q F345L T351I V357L F360Y |
| | | | | A363T A375G K377R T379A |
| 702008 | 56 | 147 | SEQ ID | B40Q N44T P46V A47T P49A F51L I52V L59F |
| | | | NO: 20 | V631 V85I S88L A95G S96T K165N F169L G173A |
| | | | (UniProt: | V181A H208Q K247R K254M G268E F273V |
| | | | I1V0C5) | K282M D284E D286E V288L M290F K296R H302Q |
| | | | | V309I G311S E344Q F345L T351I V357L F360Y |
| | | | | A363T A375G K377R T379A |
| 702022 | 57 | 148 | SEQ ID | Q3IR E40K Y41H P46V F51L I52V V63L T74I |
| | | | NO: 20 | V90N S96T K165N F169L G173A V181A H208Q |
| | | | (UniProt: | K247R K254M G268E F273V K282M D284E D286E |
| | | | I1V0C5) | V288L M290F K296R H302Q V309I G311S E344Q |
| | | | | F345L T351I V357L F360Y A363T A375G K377R |
| | | | | T379A |
| 702056 | 58 | 149 | SEQ ID | H69R |
| | | | NO: 13 | |
| | | | (UniProt: | |
| | | | A6P6V9) | |
| 702080 | 59 | 150 | SEQ ID | I63L L443I T446I V462I S464N L479M H494F |
| | | | NO: 14 | A495E N528D P542L H543R |
| | | | (UniProt: | |
| | | | Q8GTB6) | |
| 702105 | 60 | 151 | SEQ ID | A410T |
| | | | NO: 13 | |
| | | | (UniProt: | |
| | | | A6P6V9) | |
| 702109 | 61 | 152 | SEQ ID | A410V |
| | | | NO: 13 | |
| | | | (UniProt: | |
| | | | A6P6V9) | |
| 702115 | 62 | 153 | SEQ ID | G378S |
| | | | NO: 13 | |
| | | | (UniProt: | |
| | | | A6P6V9) | |
| 702118 | 63 | 154 | SEQ ID | I63L L443I T446I V462I S464N L479M H494F |
| | | | NO: 14 | A495E N528D P542L H543R |
| | | | (UniProt: | |
| | | | Q8GTB6) | |
| 702123 | 64 | 155 | SEQ ID | R31Q K40Q H41Y N44T A47T P49A L59F I74T |
| | | | NO: 14 | V85I S88L N90V A95G P542L H543R |
| | | | (UniProt: | |
| | | | Q8GTB6) | |
| 702136 | 65 | 156 | SEQ ID | H213N |
| | | | NO: 13 | |
| | | | (UniProt: | |
| | | | A6P6V9) | |
| 702147 | 66 | 157 | SEQ ID | E424D E425K A430T L443V T446I A447C I459L |
| | | | NO: 14 | V462I S464N V465I T469M Q475K L489I K491I |
| | | | (UniProt: | T492N N493D H494P A495K S496N N516D K524L |
| | | | Q8GTB6) | P542R H544R |
| 702150 | 67 | 158 | SEQ ID | |
| | | | NO: 14 | |
| | | | (UniProt: | |
| | | | Q8GTB6) | |
| 702155 | 68 | 159 | SEQ ID | E40Q N44T P46V A47T P49A F51L I52V L59F |
| | | | NO: 20 | V631 V85I S88L A95G S96T K165N F169L G173A |
| | | | (UniProt: | V181A H208Q K247R K254M G268E F273V |
| | | | I1V0C5) | K282M D284E D286E V288L M290F K296R H302Q |
| | | | | V309I G311S E344Q F345L T351I V357L F360Y |
| | | | | A363T A375G K377R T379A T395S A396V M397F |
| | | | | K399Q V409I V411A V415A E424D M440L T446I |
| | | | | A447C I459L V462I S464N V465I T469M Q475K |
| | | | | L489I K491I T492N N493D E495K S496N N516D |
| | | | | K524L A525V PS42R H544R |
| 702187 | 69 | 160 | SEQ ID | G378T |
| | | | NO: 13 | |
| | | | (UniProt: | |
| | | | A6P6V9) | |
| 702201 | 70 | 161 | SEQ ID | E424D E425K A430T L443V T446I A447C I459L |
| | | | NO: 14 | V462I S464N V465I T469M Q475K L489I K491I |
| | | | (UniProt: | T492N N493D H494P A495K S496N N516D K524L |
| | | | Q8GTB6) | P542R H544R |
| 702215 | 71 | 162 | SEQ ID | Q31R E40K Y41H P46V F51L I52V V63L T74I |
| | | | NO: 20 | V90N S96T K165N F169L G173A V181A H208Q |
| | | | (UniProt: | K247R K254M G268E F273V K282M D284E D286E |
| | | | I1V0CS) | V288L M290F K296R H302Q V309I G311S E344Q |
| | | | | F345L T351I V357L F360Y A363T A375G K377R |
| | | | | T379A T395S A396V M397F K399Q V409I V411A |
| | | | | V415A E424D M440L T446I A447C I459L V462I |
| | | | | S464N V465I T469M Q475K L489I K491I T492N |
| | | | | N493D E495K S496N N516D K524L A525V P542R |
| | | | | H544R |
| 702257 | 72 | 163 | SEQ ID | T339E |
| | | | NO: 13 | |
| | | | (UniProt: | |
| | | | A6P6V9) | |
| 702258 | 73 | 164 | SEQ ID | R31Q K40Q H41Y I74T N90V V129I V288L K296R |
| | | | NO: 14 | F345L F360Y A411V E424D H494P A495E |
| | | | (UniProt: | |
| | | | Q8GTB6) | |
| 702261 | 74 | 165 | SEQ ID | G319D |
| | | | NO: 13 | |
| | | | (UniProt: | |
| | | | A6P6V9) | |
| 702276 | 75 | 166 | SEQ ID | H89D |
| | | | NO: 13 | |
| | | | (UniProt: | |
| | | | A6P6V9) | |
| 702278 | 76 | 167 | SEQ ID | Q31R E40K Y41H P46V F51L I52V V63L T74I |
| | | | NO: 20 | V90N S96T K165N F169L G173A V181A H208Q |
| | | | (UniProt: | K247R K254M G268E F273V K282M D284E D286E |
| | | | I1V0C5) | V288L M290F K296R H302Q V309I G311S E344Q |
| | | | | F345L T351I V357L F360Y A363T A375G K377R |
| | | | | T379A T395S A396V M397F K399Q V409I V411A |
| | | | | V415A E424D M440L T446I A447C I459L V462I |
| | | | | S464N V465I T469M Q475K L489I K491I T492N |
| | | | | N493D E495K S496N N516D K524L A525V P542R |
| | | | | H544R |
| 702280 | 77 | 168 | SEQ ID | H89E |
| | | | NO: 13 | |
| | | | (UniProt: | |
| | | | A6P6V9) | |
| 702288 | 78 | 169 | SEQ ID | M289F |
| | | | NO: 13 | |
| | | | (UniProt: | |
| | | | A6P6V9) | |
| 702297 | 79 | 170 | SEQ ID | G378R |
| | | | NO: 13 | |
| | | | (UniProt: | |
| | | | A6P6V9) | |
| 702304 | 80 | 171 | SEQ ID | H89Q |
| | | | NO: 13 | |
| | | | (UniProt: | |
| | | | A6P6V9) | |
| 702308 | 81 | 172 | SEQ ID | H89R |
| | | | NO: 13 | |
| | | | (UniProt: | |
| | | | A6P6V9) | |
| 702315 | 82 | 173 | SEQ ID | Y353M |
| | | | NO: 13 | |
| | | | (UniProt: | |
| | | | A6P6V9) | |
| 702329 | 83 | 174 | SEQ ID | I382S |
| | | | NO: 13 | |
| | | | (UniProt: | |
| | | | A6P6V9) | |
| 702338 | 84 | 175 | SEQ ID | A414I |
| | | | NO: 13 | |
| | | | (UniProt: | |
| | | | A6P6V9) | |
| 702342 | 85 | 176 | SEQ ID | A414L |
| | | | NO: 13 | |
| | | | (UniProt: | |
| | | | A6P6V9) | |
| 702346 | 86 | 177 | SEQ ID | A414M |
| | | | NO: 13 | |
| | | | (UniProt: | |
| | | | A6P6V9) | |
| 702350 | 87 | 178 | SEQ ID | R31Q K40Q H41Y V46A A47T P49A H56N Q58P |
| | | | NO: 14 | I63V I74T N90V A95G V129I H136R G173A |
| | | | (UniProt: | V181A N237S A242V K247R I257M G268E F273V |
| | | | Q8GTB6) | V288L K296R H302Q V309I G311S H318L E344Q |
| | | | | F345L T351I F360Y N361D A363T K377Q K378N |
| | | | | T379A S382K A396V A411V E424D T446I I459L |
| | | | | V462I S464N T469M T492N H494P A495K P542R |
| | | | | H544R |
| 702370 | 88 | 179 | SEQ ID | Y416F |
| | | | NO: 13 | |
| | | | (UniProt: | |
| | | | A6P6V9) | |
| 702376 | 89 | 180 | SEQ ID | S116A |
| | | | NO: 13 | |
| | | | (UniProt: | |
| | | | A6P6V9) | |
| 702396 | 90 | 181 | SEQ ID | M289W |
| | | | NO: 13 | |
| | | | (UniProt: | |
| | | | A6P6V9) | |
| 702412 | 91 | 182 | SEQ ID | S116G |
| | | | NO: 13 | |
| | | | (UniProt: | |
| | | | A6P6V9) | |
| 702462 | 92 | 183 | SEQ ID | Y416I |
| | | | NO: 13 | |
| | | | (UniProt: | |
| | | | A6P6V9) | |
| 702470 | 93 | 184 | SEQ ID | Y416M |
| | | | NO: 13 | |
| | | | (UniProt: | |
| | | | A6P6V9) | |
| 702485 | 94 | 185 | SEQ ID | N168T |
| | | | NO: 13 | |
| | | | (UniProt: | |
| | | | A6P6V9) | |
| 702507 | 95 | 186 | SEQ ID | H143E |
| | | | NO: 13 | |
| | | | (UniProt: | |
| | | | A6P6V9) | |
| 702513 | 96 | 187 | SEQ ID | Q106E |
| | | | NO: 13 | |
| | | | (UniProt: | |
| | | | A6P6V9) | |
| 702517 | 97 | 188 | SEQ ID | L344M |
| | | | NO: 13 | |
| | | | (UniProt: | |
| | | | A6P6V9) | |
| 702531 | 98 | 189 | SEQ ID | Q376L |
| | | | NO: 13 | |
| | | | (UniProt: | |
| | | | A6P6V9) | |
| 702563 | 99 | 190 | SEQ ID | Q376Y |
| | | | NO: 13 | |
| | | | (UniProt: | |
| | | | A6P6V9) | |
| 702571 | 100 | 191 | SEQ ID | G378K |
| | | | NO: 13 | |
| | | | (UniProt: | |
| | | | A6P6V9) | |
| 702581 | 101 | 192 | SEQ ID | A414T |
| | | | NO: 13 | |
| | | | (UniProt: | |
| | | | A6P6V9) | |
| 702585 | 102 | 193 | SEQ ID | A414V |
| | | | NO: 13 | |
| | | | (UniProt: | |
| | | | A6P6V9) | |
| 702591 | 103 | 194 | SEQ ID | V397E |
| | | | NO: 13 | |
| | | | (UniProt: | |
| | | | A6P6V9) | |
| 702595 | 104 | 195 | SEQ ID | S100A |
| | | | NO: 13 | |
| | | | (UniProt: | |
| | | | A6P6V9) | |
| 702601 | 105 | 196 | SEQ ID | E40Q P46A A49S P51A F53L I54V H58N Q60P |
| | | | NO: 20 | A97G S98T V131I H138R F171L G175A V183A |
| | | | (UniProt: | N239S A244V K249R I259M G270E F275V V290L |
| | | | I1V0C5) | K298R H304Q V311I G313S H320L E346Q F347L |
| | | | | T353I F362Y N363D A365T K379Q K380N T381A |
| | | | | S384K A398V E426D T448I I461L V464I S466N |
| | | | | T471M T494N E497K A527V P544R H546R |
| 702603 | 106 | 197 | SEQ ID | M263L |
| | | | NO: 13 | |
| | | | (UniProt: | |
| | | | A6P6V9) | |
| 702660 | 107 | 198 | SEQ ID | R31Q K40Q H41Y N44T A47T P49A L59F I74T |
| | | | NO: 14 | V85I S88L N90V A95G P542L H543R |
| | | | (UniProt: | |
| | | | Q8GTB6) | |
| 702688 | 108 | 199 | SEQ ID | I63L L443I T446I V462I S464N L479M H494F |
| | | | NO: 14 | A495E N528D P542L H543R |
| | | | (UniProt: | |
| | | | Q8GTB6) | |
| 702891 | 109 | 200 | SEQ ID | P542R H544R |
| | | | NO: 14 | |
| | | | (UniProt: | |
| | | | Q8GTB6) | |
| 702948 | 110 | 201 | SEQ ID | L287T |
| | | | NO: 13 | |
| | | | (UniProt: | |
| | | | A6P6V9) | |
| 703131 | 111 | 202 | SEQ ID | I445V |
| | | | NO: 13 | |
| | | | (UniProt: | |
| | | | A6P6V9) | |
| 703178 | 112 | 203 | SEQ ID | A250D |
| | | | NO: 14 | |
| | | | (UniProt: | |
| | | | Q8GTB6) | |
| 703300 | 113 | 204 | SEQ ID | E4418 |
| | | | NO: 13 | |
| | | | (UniProt: | |
| | | | A6P6V9) | |
| 703306 | 114 | 205 | SEQ ID | E44IT |
| | | | NO: 13 | |
| | | | (UniProt: | |
| | | | A6P6V9) | |
| 703341 | 115 | 206 | SEQ ID | Q31R E40K Y41H P46V F51L I52V V63L T74I |
| | | | NO: 20 | V90N S96T K165N F169L G173A V181A H208Q |
| | | | (UniProt: | K247R K254M G268E F273V K282M D284E D286E |
| | | | I1V0C5) | V288L M290F K296R H302Q V309I G311S E344Q |
| | | | | F345L T351I V357L F360Y A363T A375G K377R |
| | | | | T379A |
| 703452 | 116 | 207 | SEQ ID | V397K |
| | | | NO: 13 | |
| | | | (UniProt: | |
| | | | A6P6V9) | |
| 703455 | 117 | 208 | SEQ ID | N454A |
| | | | NO: 13 | |
| | | | (UniProt: | |
| | | | A6P6V9) | |
| 703459 | 118 | 209 | SEQ ID | V103H |
| | | | NO: 13 | |
| | | | (UniProt: | |
| | | | A6P6V9) | |
| 703473 | 119 | 210 | SEQ ID | N527D |
| | | | NO: 13 | |
| | | | (UniProt: | |
| | | | A6P6V9) | |
| 703482 | 120 | 211 | SEQ ID | G319N |
| | | | NO: 13 | |
| | | | (UniProt: | |
| | | | A6P6V9) | |
| 703520 | 121 | 212 | SEQ ID | Q124N |
| | | | NO: 13 | |
| | | | (UniProt: | |
| | | | A6P6V9) | |
| 703524 | 122 | 213 | SEQ ID | A250R |
| | | | NO: 13 | |
| | | | (UniProt: | |
| | | | A6P6V9) | |
| 703528 | 123 | 214 | SEQ ID | V216L |
| | | | NO: 13 | |
| | | | (UniProt: | |
| | | | A6P6V9) | |
| 703584 | 124 | 215 | SEQ ID | E167K |
| | | | NO: 13 | |
| | | | (UniProt: | |
| | | | A6P6V9) | |
| 703607 | 125 | 216 | SEQ ID | K512N |
| | | | NO: 13 | |
| | | | (UniProt: | |
| | | | A6P6V9) | |
| 703611 | 126 | 217 | SEQ ID | K450S |
| | | | NO: 13 | |
| | | | (UniProt: | |
| | | | A6P6V9) | |
| 703634 | 127 | 218 | SEQ ID | D407E |
| | | | NO: 13 | |
| | | | (UniProt: | |
| | | | A6P6V9) | |
| 703638 | 128 | 219 | SEQ ID | D283P |
| | | | NO: 13 | |
| | | | (UniProt: | |
| | | | A6P6V9) | |
| 703685 | 129 | 220 | SEQ ID | G95A |
| | | | NO: 13 | |
| | | | (UniProt: | |
| | | | A6P6V9) | |
| 703699 | 130 | 221 | SEQ ID | N166S |
| | | | NO: 13 | |
| | | | (UniProt: | |
| | | | A6P6V9) | |
| 703703 | 131 | 222 | SEQ ID | I490T |
| | | | NO: 13 | |
| | | | (UniProt: | |
| | | | A6P6V9) | |
| 703707 | 132 | 223 | SEQ ID | S322E |
| | | | NO: 13 | |
| | | | (UniProt: | |
| | | | A6P6V9) | |
| 703721 | 133 | 224 | SEQ ID | S394E |
| | | | NO: 13 | |
| | | | (UniProt: | |
| | | | A6P6V9) | |
| 703738 | 134 | 225 | SEQ ID | K50N |
| | | | NO: 13 | |
| | | | (UniProt: | |
| | | | A6P6V9) | |
| 616315 | 22 | 21 | — | — |
| 701870 | 254 | 284 | — | — |
| 701939 | 255 | 285 | SEQ ID | V288M |
| | | | NO: 14 | |
| | | | (UniProt: | |
| | | | Q8GTB6) | |
| 701954 | 256 | 286 | SEQ ID | A250D |
| | | | NO: 14 | |
| | | | (UniProt: | |
| | | | Q8GTB6) | |
| 701963 | 257 | 287 | SEQ ID | P542R H544R |
| | | | NO: 14 | |
| | | | (UniProt: | |
| | | | Q8GTB6) | |
| 701977 | 258 | 288 | SEQ ID | R31Q K40Q H41Y N44T A47T P49A L59F I74T |
| | | | NO: 14 | V85I S88L N90V A95G P542L H543R |
| | | | (UniProt: | |
| | | | Q8GTB6) | |
| 701990 | 259 | 289 | SEQ ID | I63L P542L |
| | | | NO: 14 | |
| | | | (UniProt: | |
| | | | Q8GTB6) | |
| 701996 | 260 | 290 | SEQ ID | N89E |
| | | | NO: 14 | |
| | | | (UniProt: | |
| | | | Q8GTB6) | |
| 702000 | 261 | 291 | SEQ ID | N89H |
| | | | NO: 14 | |
| | | | (UniProt: | |
| | | | Q8GTB6) | |
| 702043 | 262 | 292 | SEQ ID | V288T |
| | | | NO: 14 | |
| | | | (UniProt: | |
| | | | Q8GTB6) | |
| 702050 | 263 | 293 | SEQ ID | R31Q K40Q H41Y N44T A47T P49A L59F I74T |
| | | | NO: 14 | V85I S88L N90V A95G P542L H543R |
| | | | (UniProt: | |
| | | | Q8GTB6) | |
| 702054 | 264 | 294 | SEQ ID | I63L P542L |
| | | | NO: 14 | |
| | | | (UniProt: | |
| | | | Q8GTB6) | |
| 702090 | 265 | 295 | SEQ ID | A250D |
| | | | NO: 14 | |
| | | | (UniProt: | |
| | | | Q8GTB6) | |
| 702154 | 266 | 296 | SEQ ID | A250D |
| | | | NO: 14 | |
| | | | (UniProt: | |
| | | | Q8GTB6) | |
| 702232 | 267 | 297 | SEQ ID | I63L P542L |
| | | | NO: 14 | |
| | | | (UniProt: | |
| | | | Q8GTB6) | |
| 702240 | 268 | 298 | SEQ ID | R31Q K40Q H41Y N44T A47T P49A L59F I74T |
| | | | NO: 14 | V85I S88L N90V A95G PS42L H543R |
| | | | (UniProt: | |
| | | | Q8GTB6) | |
| 702761 | 269 | 299 | SEQ ID | N61Q N301Q |
| | | | NO: 20 | |
| | | | (UniProt: | |
| | | | I1V0C5) | |
| 702767 | 270 | 300 | SEQ ID | N61Q N301Q N495Q |
| | | | NO: 20 | |
| | | | (UniProt: | |
| | | | IIVoC5) | |
| 702801 | 271 | 301 | SEQ ID | N61Q N301Q N325Q |
| | | | NO: 20 | |
| | | | (UniProt: | |
| | | | I1V0C5) | |
| 702894 | 272 | 302 | SEQ ID | H494D |
| | | | NO: 14 | |
| | | | (UniProt: | |
| | | | Q8GTB6) | |
| 702927 | 273 | 303 | SEQ ID | N61Q N164Q |
| | | | NO: 20 | |
| | | | (UniProt: | |
| | | | I1V0C5) | |
| 702942 | 274 | 304 | SEQ ID | H494E |
| | | | NO: 14 | |
| | | | (UniProt: | |
| | | | Q8GTB6) | |
| 702993 | 275 | 305 | SEQ ID | I63L P542L |
| | | | NO: 14 | |
| | | | (UniProt: | |
| | | | Q8GTB6) | |
| 703174 | 276 | 306 | SEQ ID | |
| | | | NO: 14 | |
| | | | (UniProt: | |
| | | | Q8GTB6) | |
| 703239 | 277 | 307 | SEQ ID | T469M |
| | | | NO: 14 | |
| | | | (UniProt: | |
| | | | Q8GTB6) | |
| 703256 | 278 | 308 | SEQ ID | I63L P542L |
| | | | NO: 14 | |
| | | | (UniProt: | |
| | | | Q8GTB6) | |
| 703289 | 279 | 309 | SEQ ID | N329Q |
| | | | NO: 14 | |
| | | | (UniProt: | |
| | | | Q8GTB6) | |
| 703637 | 280 | 310 | SEQ ID | N499Q |
| | | | NO: 14 | |
| | | | (UniProt: | |
| | | | Q8GTB6) | |
| 703690 | 281 | 311 | SEQ ID | M61S |
| | | | NO: 14 | |
| | | | (UniProt: | |
| | | | Q8GTB6) | |
| 703722 | 282 | 312 | SEQ ID | N90E |
| | | | NO: 14 | |
| | | | (UniProt: | |
| | | | Q8GTB6) | |
| 703725 | 283 | 313 | SEQ ID | H136R |
| | | | NO: 14 | |
| | | | (UniProt: | |
| | | | Q8GTB6) | |

TABLE 18
Amino Acid Substitutions in Terminal Synthases Described in Example 4

| | Nucleic | Amino | Reference | |
|---|---|---|---|---|
| Strain | acid SEQ | acid SEQ | Sequence | Amino Acid Substitutions Relative to Reference |
| ID | ID NO: | ID NO: | ID | Sequence |
| t825123 | 322 | 464 | SEQ ID NO: | A414V |
| | | | 13 (UniProt: | |
| | | | A6P6V9) | |
| t825215 | 323 | 465 | SEQ ID NO: | A414V |
| | | | 13 (UniProt: | |
| | | | A6P6V9) | |
| t825585 | 324 | 466 | SEQ ID NO: | A414V |
| | | | 13 (UniProt: | |
| | | | A6P6V9) | |
| t826070 | 325 | 467 | SEQ ID NO: | S116A |
| | | | 13 (UniProt: | |
| | | | A6P6V9) | |
| t826072 | 326 | 468 | SEQ ID NO: | S116A |
| | | | 13 (UniProt: | |
| | | | A6P6V9) | |
| t826076 | 327 | 469 | SEQ ID NO: | S116A |
| | | | 13 (UniProt: | |
| | | | A6P6V9) | |
| t826096 | 328 | 470 | SEQ ID NO: | S116A |
| | | | 13 (UniProt: | |
| | | | A6P6V9) | |
| t825125 | 329 | 471 | SEQ ID NO: | K50N |
| | | | 13 (UniProt: | |
| | | | A6P6V9) | |
| t825t89 | 330 | 472 | SEQ ID NO: | K50N |
| | | | 13 (UniProt: | |
| | | | A6P6V9) | |
| t825217 | 331 | 473 | SEQ ID NO: | K50N |
| | | | 13 (UniProt: | |
| | | | A6P6V9) | |
| t825219 | 332 | 474 | SEQ ID NO: | R31Q K40Q H41Y N44T A47T P49A L59F I74T V85I |
| | | | 14 (UniProt: | S88L N90V A95G P542L H543R |
| | | | Q8GTB6) | |
| t825377 | 333 | 475 | SEQ ID NO: | R31Q K40Q H41Y N44T A47T P49A L59F I74T V85I |
| | | | 14 (UniProt: | S88L N90V A95G P542L H543R |
| | | | Q8GTB6) | |
| t826030 | 334 | 476 | SEQ ID NO: | R31Q K40Q H41Y N44T A47T P49A L59F I74T V85I |
| | | | 14 (UniProt: | S88L N90V A95G P542L H543R |
| | | | Q8GTB6) | |
| t826036 | 335 | 477 | SEQ ID NO: | R31Q K40Q H41Y N44T A47T P49A L59F I74T V85I |
| | | | 14 (UniProt: | S88L N90V A95G P542L H543R |
| | | | Q8GTB6) | |
| t824622 | 336 | 478 | SEQ ID NO: | R31Q K40Q H41Y I74T N90V V129I V288L K296R |
| | | | 14 (UniProt: | F345L F360Y A411V E424D H494P A495E |
| | | | Q8GTB6) | |
| t825119 | 337 | 479 | SEQ ID NO: | R31Q K40Q H41Y I74T N90V V129I V288L K296R |
| | | | 14 (UniProt: | F345L F360Y A411V E424D H494P A495E |
| | | | Q8GTB6) | |
| t825129 | 338 | 480 | SEQ ID NO: | R31Q K40Q H41Y I74T N90V V129I V288L K296R |
| | | | 14 (UniProt: | F345L F360Y A411V E424D H494P A495E |
| | | | Q8GTB6) | |
| t825151 | 339 | 481 | SEQ ID NO: | R31Q K40Q H41Y I74T N90V V129I V288L K296R |
| | | | 14 (UniProt: | F345L F360Y A411V E424D H494P A495E |
| | | | Q8GTB6) | |
| t825213 | 340 | 482 | SEQ ID NO: | R3IQ K40Q H41Y I74T N90V V129I V288L K296R |
| | | | 14 (UniProt: | F345L F360Y A411V E424D H494P A495E |
| | | | Q8GTB6) | |
| t825221 | 341 | 483 | SEQ ID NO: | R31Q K40Q H41Y I74T N90V V129I V288L K296R |
| | | | 14 (UniProt: | F345L F360Y A411V E424D H494P A495E |
| | | | Q8GTB6) | |
| t825379 | 342 | 484 | SEQ ID NO: | R31Q K40Q H41Y I74T N90V V129I V288L K296R |
| | | | 14 (UniProt: | F345L F360Y A411V E424D H494P A495E |
| | | | Q8GTB6) | |
| t826054 | 343 | 485 | SEQ ID NO: | R31Q K40Q H41Y I74T N90V V129I V288L K296R |
| | | | 14 (UniProt: | F345L F360Y A411V E424D H494P A495E |
| | | | Q8GTB6) | |
| t826100 | 344 | 486 | SEQ ID NO: | R31Q K40Q H41Y I74T N90V V129I V288L K296R |
| | | | 14 (UniProt: | F345L F360Y A411V E424D H494P A495E |
| | | | Q8GTB6) | |
| t826132 | 345 | 487 | SEQ ID NO: | R31Q K40Q H41Y I74T N90V V129I V288L K296R |
| | | | 14 (UniProt: | F345L F360Y A411V E424D H494P A495E |
| | | | Q8GTB6) | |
| t824932 | 346 | 488 | SEQ ID NO: | R31Q K40Q H41Y H56N M61S I74T N90V V129I |
| | | | 14 (UniProt: | S255V V288L M290F K296R T340E F345L T351I |
| | | | Q8GTB6) | F360Y A411V E424D Q475K T492N H494P A495E |
| t825910 | 347 | 489 | SEQ ID NO: | R31Q K40Q H41Y V46P M61S I74T N90V V129I |
| | | | 14 (UniProt: | S255V V288L M290F K296R T340E F345L F360Y |
| | | | Q8GTB6) | A411V E424D T492N H494P A495E |
| t825025 | 348 | 490 | SEQ ID NO: | I74T N90V A250D S255V H494B |
| | | | 14 (UniProt: | |
| | | | Q8GTB6) | |
| t825621 | 349 | 491 | SEQ ID NO: | A250D S255V H494E |
| | | | 14 (UniProt: | |
| | | | Q8GTB6) | |
| t824996 | 350 | 492 | SEQ ID NO: | R31Q K40Q H41Y V46P H56N M618 I74T N90V |
| | | | 14 (UniProt: | V129I S255V V288L M290F K296R F345L F360Y |
| | | | Q8GTB6) | A411V E424D T492N H494P A495E |
| t824498 | 351 | 493 | SEQ ID NO: | R31Q K40Q H41Y V46P H56N M61S I74T N90V |
| | | | 14 (UniProt: | V129I H143E S255V V288L M290F K296R T340E |
| | | | Q8GTB6) | F345L Y354F F360Y A411V E424D Q475K T492N |
| | | | | H494P A495E |
| t825269 | 352 | 494 | SEQ ID NO: | R31Q K40Q H41Y V46P V52I H56N Q58S M61S I74T |
| | | | 14 (UniProt: | N90V V129I S255V V288L M290F K296R T340E |
| | | | Q8GTB6) | |
| | | | | F345L F360Y A411V E424D Q475K T492N H494P |
| | | | | A495E |
| t825259 | 353 | 495 | SEQ ID NO: | R31Q K40Q H41Y H56N Q58S M61S I74T N90V |
| | | | 14 (UniProt: | V129I S255V V288L M290F K296R T340E F345L |
| | | | Q8GTB6) | F360Y A411V E424D Q475K T492N H494P A495E |
| t825978 | 354 | 496 | SEQ ID NO: | R31Q K40Q H41Y M61S I74T N90V V129I S255V |
| | | | 14 (UniProt: | V288L M290F K296R T340E F345L F360Y A411V |
| | | | Q8GTB6) | E424D Q475K T492N H494P A495E |
| t825043 | 355 | 497 | SEQ ID NO: | R31Q K40Q H41Y Q58S M61S I74T N90V V129I |
| | | | 14 (UniProt: | H143E S255V V288L M290F K296R T340E F345L |
| | | | Q8GTB6) | F360Y A411V E424D Q475K T492N H494P A495E |
| t825528 | 356 | 498 | SEQ ID NO: | R31Q K40Q H41Y V46P H56N Q58S M61S I74T N90V |
| | | | 14 (UniProt: | V129I V158L S255V V288L M290F K296R T340E |
| | | | Q8GTB6) | F345L F360Y A411V E424D Q475K T492N H494P |
| | | | | A495E |
| t824930 | 357 | 499 | SEQ ID NO: | R31Q M61S I74T N90V A250P S255V E424D Q475K |
| | | | 14 (UniProt: | T492N H494E |
| | | | Q8GTB6) | |
| t825077 | 358 | 500 | SEQ ID NO: | R31Q K40Q H41Y I74T N90V V129I H143E S255V |
| | | | 14 (UniProt: | V288L M290F K296R F345L F360Y A411V E424D |
| | | | Q8GTB6) | T492N H494P A495E |
| t825023 | 359 | 501 | SEQ ID NO: | H56N I74T N90V A250D S255V T492N H494E |
| | | | 14 (UniProt: | |
| | | | Q8GTB6) | |
| t825103 | 360 | 502 | SEQ ID NO: | R31Q V46P I74T N90V A250D S255V E424D Q475K |
| | | | 14 (UniProt: | T492N H494E A495E |
| | | | Q8GTB6) | |
| t824618 | 361 | 503 | SEQ ID NO: | R31Q K40Q H41Y V46P H56N Q58S M61S I74T N90V |
| | | | 14 (UniProt: | V129I S255V V288L M290F K296R T340E F345L |
| | | | Q8GTB6) | F360Y A411V E424D T446I Q475K T492N H494P |
| | | | | A495E |
| t825071 | 362 | 504 | SEQ ID NO: | V46P I74T N90V A250D S255V |
| | | | 14 (UniProt: | |
| | | | Q8GTB6) | |
| t825059 | 363 | 505 | SEQ ID NO: | H56N M61S I74T N90V A250P S255V T492N H494E |
| | | | 14 (UniProt: | |
| | | | Q8GTB6) | |
| t825126 | 364 | 506 | SEQ ID NO: | K50N H69Q G95A H213N Q343E L344M |
| | | | 13 (UniProt: | |
| | | | A6P6V9) | |
| t825766 | 365 | 507 | SEQ ID NO: | K50N H69Q G95A H213N T339E L344M |
| | | | 13 (UniProt: | |
| | | | A6P6V9) | |
| t825987 | 366 | 508 | SEQ ID NO: | H69Q G95A S116A T339E |
| | | | 13 (UniProt: | |
| | | | A6P6V9) | |
| t826274 | 367 | 509 | SEQ ID NO: | H69Q G95A S116A T339E Q343E |
| | | | 13 (UniProt: | |
| | | | A6P6V9) | |
| t825341 | 368 | 510 | SEQ ID NO: | T47A L49P N56H N57D P58Q H69Q H89N G95A S253 |
| | | | 13 (UniProt: | insertion |
| | | | A6P6V9) | |
| t826093 | 369 | 511 | SEQ ID NO: | S100A S116A H213N |
| | | | 13 (UniProt: | |
| | | | A6P6V9) | |
| t825841 | 370 | 512 | SEQ ID NO: | G95A H213N T339E Q343E A414V D492N |
| | | | 13 (UniProt: | |
| | | | A6P6V9) | |
| t824918 | 371 | 513 | SEQ ID NO: | H69Q G95A S116A H213N T339E Q343E |
| | | | 13 (UniProt: | |
| | | | A6P6V9) | |
| t825034 | 372 | 514 | SEQ ID NO: | K50N H69Q G95A Q343E |
| | | | 13 (UniProt: | |
| | | | A6P6V9) | |
| t825593 | 373 | 515 | SEQ ID NO: | G95A T339E L344M A414V |
| | | | 13 (UniProt: | |
| | | | A6P6V9) | |
| t825277 | 374 | 516 | SEQ ID NO: | R31Q T47A L49P N56H N57D P58Q H69Q H89N |
| | | | 13 (UniProt: | G95A S253 insertion |
| | | | A6P6V9) | |
| t825833 | 375 | 517 | SEQ ID NO: | G95A T339E Q343E L344M A414V |
| | | | 13 (UniProt: | |
| | | | A6P6V9) | |
| t825936 | 376 | 518 | SEQ ID NO: | G95A S116A T339E Q343E L344M |
| | | | 13 (UniProt: | |
| | | | A6P6V9) | |
| t825933 | 377 | 519 | SEQ ID NO: | K50N H69Q G95A H213N Q343E L344M A414V |
| | | | 13 (UniProt: | |
| | | | A6P6V9) | |
| t824603 | 378 | 520 | SEQ ID NO: | K50N G95A S116A H213N L344M N527D |
| | | | 13 (UniProt: | |
| | | | A6P6V9) | |
| t824539 | 379 | 521 | SEQ ID NO: | K50N G95A H213N T339E Q343E A414V D492N |
| | | | 13 (UniProt: | |
| | | | A6P6V9) | |
| t824659 | 380 | 522 | SEQ ID NO: | G95A H213N T339E G378T A410V A414V I445V |
| | | | 13 (UniProt: | |
| | | | A6P6V9) | |
| t824773 | 381 | 523 | SEQ ID NO: | G95A S116A T339E |
| | | | 13 (UniProt: | |
| | | | A6P6V9) | |
| t825907 | 382 | 524 | SEQ ID NO: | G95A H213N Q343E L344M A414V |
| | | | 13 (UniProt: | |
| | | | A6P6V9) | |
| t825930 | 383 | 525 | SEQ ID NO: | G95A S116A H213N Q343E L344M |
| | | | 13 (UniProt: | |
| | | | A6P6V9) | |
| t826097 | 384 | 526 | SEQ ID NO: | K50N G95A A414V |
| | | | 13 (UniProt: | |
| | | | A6P6V9) | |
| t825889 | 385 | 527 | SEQ ID NO: | G95A H213N T339E L344M A414V |
| | | | 13 (UniProt: | |
| | | | A6P6V9) | |
| t824654 | 386 | 528 | SEQ ID NO: | K50N H69Q G95A Q343E A414V |
| | | | 13 (UniProt: | |
| | | | A6P6V9) | |
| t824571 | 387 | 529 | SEQ ID NO: | K50N H69Q G95A H213N T339E Q343E A414V |
| | | | 13 (UniProt: | |
| | | | A6P6V9) | |
| t825248 | 388 | 530 | SEQ ID NO: | G95A S116A Q343E |
| | | | 13 (UniProt: | |
| | | | A6P6V9) | |
| t824807 | 389 | 531 | SEQ ID NO: | G95A S116A H213N T339E Q343E |
| | | | 13 (UniProt: | |
| | | | A6P6V9) | |
| t825877 | 390 | 532 | SEQ ID NO: | G95A H213N Q343B A414V |
| | | | 13 (UniProt: | |
| | | | A6P6V9) | |
| t826099 | 391 | 533 | SEQ ID NO: | G95A Q343E G378T A414V |
| | | | 13 (UniProt: | |
| | | | A6P6V9) | |
| t824746 | 392 | 534 | SEQ ID NO: | H69Q G95A H213N T339E Q343E L344M A414V |
| | | | 13 (UniProt: | |
| | | | A6P6V9) | |
| t824612 | 393 | 535 | SEQ ID NO: | K50N G95A H213N Q343E L344M A414V |
| | | | 13 (UniProt: | |
| | | | A6P6V9) | |
| t824626 | 394 | 536 | SEQ ID NO: | H69Q G95A H213N L344M A414V |
| | | | 13 (UniProt: | |
| | | | A6P6V9) | |
| t825154 | 395 | 537 | SEQ ID NO: | G95A S116A T339E Q343E |
| | | | 13 (UniProt: | |
| | | | A6P6V9) | |
| t824540 | 396 | 538 | SEQ ID NO: | H69Q G95A Q343E A414V N527D |
| | | | 13 (UniProt: | |
| | | | A6P6V9) | |
| t824786 | 397 | 539 | SEQ ID NO: | H69Q G95A H213N S322E Q343E L344M A414V |
| | | | 13 (UniProt: | |
| | | | A6P6V9) | |
| t824688 | 398 | 540 | SEQ ID NO: | G95A S116A H213N T339E Q343E L344M |
| | | | 13 (UniProt: | |
| | | | A6P6V9) | |
| t825012 | 399 | 541 | SEQ ID NO: | K50N H69Q H213N T339E Q343E A414V |
| | | | 13 (UniProt: | |
| | | | A6P6V9) | |
| t824646 | 400 | 542 | SEQ ID NO: | H69Q G95A H213N Q343E A414V N527D |
| | | | 13 (UniProt: | |
| | | | A6P6V9) | |
| t825862 | 401 | 543 | SEQ ID NO: | K50N G95A Q343E L344M A414V |
| | | | 13 (UniProt: | |
| | | | A6P6V9) | |
| t824653 | 402 | 544 | SEQ ID NO: | K50N G95A H213N T339E Q343E L344M A414V |
| | | | 13 (UniProt: | |
| | | | A6P6V9) | |
| t824625 | 403 | 545 | SEQ ID NO: | G95A T339E Q343E A414V |
| | | | 13 (UniProt: | |
| | | | A6P6V9) | |
| t824942 | 404 | 546 | SEQ ID NO: | K50N H69Q G95A T339B Q343B L344M A414V |
| | | | 13 (UniProt: | |
| | | | A6P6V9) | |
| t825773 | 405 | 547 | SEQ ID NO: | G95A A414V N527D |
| | | | 13 (UniProt: | |
| | | | A6P6V9) | |
| t825108 | 406 | 548 | SEQ ID NO: | K50N H213N Q343E L344M A414V |
| | | | 13 (UniProt: | |
| | | | A6P6V9) | |
| t825301 | 407 | 549 | SEQ ID NO: | I74T N90V A250P S255V E424D T492N H494E A495E |
| | | | 14 (UniProt: | |
| | | | Q8GTB6) | |
| t825935 | 408 | 550 | SEQ ID NO: | G95A H213N T339E Q343E L344M A414V |
| | | | 13 (UniProt: | |
| | | | A6P6V9) | |
| t825739 | 409 | 551 | SEQ ID NO: | G95A Q343E L344M A414V |
| | | | 13 (UniProt: | |
| | | | A6P6V9) | |
| t825724 | 410 | 552 | SEQ ID NO: | G95A H213N T339E Q343E A414V |
| | | | 13 (UniProt: | |
| | | | A6P6V9) | |
| t824845 | 411 | 553 | SEQ ID NO: | M61S I74T N90V A250P S255V E424D T492N H494E |
| | | | 14 (UniProt: | |
| | | | Q8GTB6) | |
| t825099 | 412 | 554 | SEQ ID NO: | R31Q K40Q H41Y I74T N90V V129I V288L K296R |
| | | | 14 (UniProt: | F345L F360Y A411V E424D H494P A495E Y419F |
| | | | Q8GTB6) | |
| t825297 | 413 | 555 | SEQ ID NO: | R31Q I74T N90V A250D S255V T492N H494E |
| | | | 14 (UniProt: | |
| | | | Q8GTB6) | |
| t824990 | 414 | 556 | SEQ ID NO: | I74T N90V A250P H494E |
| | | | 14 (UniProt: | |
| | | | Q8GTB6) | |
| t824771 | 415 | 557 | SEQ ID NO: | R31Q K40Q H41Y N44T A47T P49A L59F M61S I74T |
| | | | 14 (UniProt: | V85I S88L N90V A95G H143E S255V E424D T492N |
| | | | Q8GTB6) | H494E PS42L H543R |
| t825263 | 416 | 558 | SEQ ID NO: | R31Q K40Q H41Y V46P I74T N90V V129I V288L |
| | | | 14 (UniProt: | K296R T340E F345L F360Y A411V E424D H494P |
| | | | Q8GTB6) | A495E |
| t825286 | 417 | 559 | SEQ ID NO: | M61S I74T N90V A250D S255V Q475K T492N H494E |
| | | | 14 (UniProt: | A495E |
| | | | Q8GTB6) | |
| t826279 | 418 | 560 | SEQ ID NO: | R31Q HS6N I74T N90V A250P S255V Q475K T492N |
| | | | 14 (UniProt: | H494E A495E |
| | | | Q8GTB6) | |
| t825273 | 419 | 561 | SEQ ID NO: | R31Q K40Q H41Y V46P V52I H56N Q58S M61S I74T |
| | | | 14 (UniProt: | N90V V129I S255V V288L K296R F345L F360Y |
| | | | Q8GTB6) | A411V E424D Q475K T492N H494P A495E |
| t825101 | 420 | 562 | SEQ ID NO: | R31Q K40Q H41Y N44T A47T P49A L59F M61S I74T |
| | | | 14 (UniProt: | V85I S88L N90V A95G S255V T340E T492N H494E |
| | | | Q8GTB6) | A495E P542L H543R |
| t825049 | 421 | 563 | SEQ ID NO: | M61S N90V A250D S255V Q475K T492N A495E |
| | | | 14 (UniProt: | |
| | | | Q8GTB6) | |
| t826280 | 422 | 564 | SEQ ID NO: | I74T N90V A250D S255V E424D T492N A495E |
| | | | 14 (UniProt: | |
| | | | Q8GTB6) | |
| t824928 | 423 | 565 | SEQ ID NO: | R31Q K40Q H41Y I74T N90V S100A V129I H143E |
| | | | 14 (UniProt: | V288L K296R F345L T351I F360Y A411V E424D |
| | | | Q8GTB6) | T492N H494P A495E |
| t824526 | 424 | 566 | SEQ ID NO: | R31Q K40Q H41Y V46P H56N Q58S M61S I74T N90V |
| | | | 14 (UniProt: | V129I S255V V288L K296R F345L F360Y A411V |
| | | | Q8GTB6) | E424D T492N H494P A495E |
| t826284 | 425 | 567 | SEQ ID NO: | R31Q K40Q H41Y V52I M61S I74T N90V V129I |
| | | | 14 (UniProt: | S255V V288L K296R T340E F345L F360Y A411V |
| | | | Q8GTB6) | E424D Q475K T492N H494P A495E |
| t825914 | 426 | 568 | SEQ ID NO: | R31Q K40Q H41Y V46P V52I H56N M61S I74T N90V |
| | | | 14 (UniProt: | V129I S255V V288L K296R T340E F345L F360Y |
| | | | Q8GTB6) | A411V E424D Q475K T492N H494P A495E |
| t824903 | 427 | 569 | SEQ ID NO: | R31Q K40Q H41Y Q58S I74T N90V V129I H143E |
| | | | 14 (UniProt: | S255V V288L K296R F345L F360Y A411V E424D |
| | | | Q8GTB6) | T492N H494P A495E |
| t825013 | 428 | 570 | SEQ ID NO: | V46P M61S I74T N90V A250D S255V E424D Q475K |
| | | | 14 (UniProt: | T492N H494E A495E |
| | | | Q8GTB6) | |
| t826208 | 429 | 571 | SEQ ID NO: | V46P M61S I74T N90V A250P S255V T492N H494E |
| | | | 14 (UniProt: | |
| | | | Q8GTB6) | |
| t826237 | 430 | 572 | SEQ ID NO: | R31Q K40Q H41Y I74T N90V V129I S255V V288L |
| | | | 14 (UniProt: | K296R F345L T351I F360Y A411V E424D H494P |
| | | | Q8GTB6) | A495E |
| t825309 | 431 | 573 | SEQ ID NO: | R31Q K40Q H41Y V46P Q58S I74T N90V V129I |
| | | | 14 (UniProt: | S255V V288L K296R T340E F345L F360Y A411V |
| | | | Q8GTB6) | E424D Q475K T492N H494P A495E |
| t825708 | 432 | 574 | SEQ ID NO: | R31Q K40Q H41Y Q58S I74T N90V V129I S255V |
| | | | 14 (UniProt: | V288L K296R F345L F360Y A411V E424D Q475K |
| | | | Q8GTB6) | T492N H494P A495E |
| t825501 | 433 | 575 | SEQ ID NO: | R31Q K40Q H41Y I74T N90V V129I V288L K296R |
| | | | 14 (UniProt: | F345L F360Y A411V E424D H494P A495E S255V |
| | | | Q8GTB6) | |
| t825085 | 434 | 576 | SEQ ID NO: | R31Q K40Q H41Y H56N I74T N90V V129I V288L |
| | | | 14 (UniProt: | K296R F345L F360Y A411V E424D Q475K H494P |
| | | | Q8GTB6) | A495E |
| t825057 | 435 | 577 | SEQ ID NO: | R31Q M61S I74T N90V A250P S255V Q475K T492N |
| | | | 14 (UniProt: | H494E A495E |
| | | | Q8GTB6) | |
| t825496 | 436 | 578 | SEQ ID NO: | R31Q K40Q H41Y I74T N90V V129I S255V V288L |
| | | | 14 (UniProt: | K296R T340E F345L F360Y A411V E424D Q475K |
| | | | Q8GTB6) | T492N H494P A495E |
| t824647 | 437 | 579 | SEQ ID NO: | N90V A250D S255V Q475K T492N H494E A495E |
| | | | 14 (UniProt: | |
| | | | Q8GTB6) | |
| t826137 | 438 | 580 | SEQ ID NO: | M61S I74T N90V H143E A250P S255V Q475K T492N |
| | | | 14 (UniProt: | H494E A495E |
| | | | Q8GTB6) | |
| t826278 | 439 | 581 | SEQ ID NO: | R31Q V46P I74T N90V A250D S255V Q475K T492N |
| | | | 14 (UniProt: | H494E |
| | | | Q8GTB6) | |
| t825141 | 440 | 582 | SEQ ID NO: | R31Q K40Q H41Y Q58S M61S I74T N90V V129I |
| | | | 14 (UniProt: | H143E S255V V288L K296R T340E F345L F360Y |
| | | | Q8GTB6) | A411V E424D T492N H494P A495E |
| t825009 | 441 | 583 | SEQ ID NO: | N90V A250P S25SV Q475K T492N H494E |
| | | | 14 (UniProt: | |
| | | | Q8GTB6) | |
| t825086 | 442 | 584 | SEQ ID NO: | R31Q K40Q H41Y V46P H56N Q58S M61S I74T N90V |
| | | | 14 (UniProt: | V129I H143E S255V V288L K296R T340E F345L |
| | | | Q8GTB6) | Y354F F360Y A411V E424D Q475K T492N H494P |
| | | | | A495E |
| t825075 | 443 | 585 | SEQ ID NO: | R31Q K40Q H41Y V46P H56N M61S I74T N90V |
| | | | 14 (UniProt: | V129I S255V V288L K296R T340E F345L F360Y |
| | | | Q8GTB6) | A411V E424D T492N H494P A495E |
| t825725 | 444 | 586 | SEQ ID NO: | R31Q K40Q H41Y N44T V46P A47T P49A H56N |
| | | | 14 (UniProt: | Q58S L59F M61S I74T V85I S88L N90V A95G H143E |
| | | | Q8GTB6) | S255V Q475K T492N H494B A495E P542L H543R |
| t825090 | 445 | 587 | SEQ ID NO: | R31Q K40Q H41Y I74T D76N N90V V129I V158L |
| | | | 14 (UniProt: | V288L K296R T340E F345L Y354F F360Y A411V |
| | | | Q8GTB6) | E424D H494P A495E |
| t824861 | 446 | 588 | SEQ ID NO: | R31Q V46P M61S I74T N90V A250P S255V T492N |
| | | | 14 (UniProt: | H494E A495E |
| | | | Q8GTB6) | |
| t825007 | 447 | 589 | SEQ ID NO: | R31Q K40Q H41Y N44T A47T P49A L59F M61S I74T |
| | | | 14 (UniProt: | V85I S88L N90V A95G H143E S255V T340E E424D |
| | | | Q8GTB6) | T492N H494E A495E P542L H543R |
| t825084 | 448 | 590 | SEQ ID NO: | R31Q M61S I74T N90V A250P S255V T492N H494E |
| | | | 14 (UniProt: | |
| | | | Q8GTB6) | |
| t825029 | 449 | 591 | SEQ ID NO: | R31Q K40Q H41Y I74T N90V V129I V288L K296R |
| | | | 14 (UniProt: | F345L F360Y A411V E424D H494P A495E H267N |
| | | | Q8GTB6) | |
| t825015 | 450 | 592 | SEQ ID NO: | R31Q H56N M61S I74T N90V A250P S255V T492N |
| | | | 14 (UniProt: | H494E A495E |
| | | | Q8GTB6) | |
| t825031 | 451 | 593 | SEQ ID NO: | R31Q K40Q H41Y I74T N90V V129I H143E S255V |
| | | | 14 (UniProt: | V288L K296R F345L F360Y A411V E424D H494P |
| | | | Q8GTB6) | A495E |
| t825047 | 452 | 594 | SEQ ID NO: | R31Q K40Q H41Y I74T N89D N90V V129I H143E |
| | | | 14 (UniProt: | V288L K296R F345L F360Y A411V E424D H494P |
| | | | Q8GTB6) | A495E |
| t825633 | 453 | 595 | SEQ ID NO: | R31Q K40Q H41Y I74T N90V V129I V288L K296R |
| | | | 14 (UniProt: | F345L F360Y A411V E424D H494P A495E Y417V |
| | | | Q8GTB6) | |
| t825092 | 454 | 596 | SEQ ID NO: | R31Q K40Q H41Y I74T N90V V129I V288L K296R |
| | | | 14 (UniProt: | F345L F360Y A411V E424D H494P A495E K491M |
| | | | Q8GTB6) | |
| t825105 | 455 | 597 | SEQ ID NO: | R31Q K40Q H41Y N44T V46P A47T P49A H56N L59F |
| | | | 14 (UniProt: | M61S I74T V85I S88L N90V A95G S255V Q475K |
| | | | Q8GTB6) | T492N H494E A495E P542L H543R |
| t825625 | 456 | 598 | SEQ ID NO: | V46P H56N I74T N90V A250P S255V Q475K T492N |
| | | | 14 (UniProt: | H494E A495E |
| | | | Q8GTB6) | |
| t824663 | 457 | 59 | SEQ ID NO: | M61S I74T N90V A250P S255V Q475K T492N H494E |
| | | | 14 (UniProt: | |
| | | | Q8GTB6) | |
| t824937 | 458 | 600 | SEQ ID NO: | R31Q K40Q H41Y V46P V52I H56N Q58S M61S I74T |
| | | | 14 (UniProt: | N90V V129I H143E S255V V288L K296R F345L T351I |
| | | | Q8GTB6) | F360Y A411V E424D Q475K T492N H494P A495E |
| t825087 | 459 | 601 | SEQ ID NO: | R31Q K40Q H41Y N44T A47T P49A L59F I74T V85I |
| | | | 14 (UniProt: | S88L N90V A95G S255V T340E Q475K T492N H494E |
| | | | Q8GTB6) | A495E P542L H543R |
| t825078 | 460 | 602 | SEQ ID NO: | R31Q K40Q H41Y I74T N90V V129I S255V V288L |
| | | | 14 (UniProt: | K296R F345L F360Y A411V E424D T446I H494P |
| | | | Q8GTB6) | A495E |
| t825058 | 461 | 603 | SEQ ID NO: | R31Q I74T N90V A250D S255V |
| | | | 14 (UniProt: | |
| | | | Q8GTB6) | |
| t825024 | 462 | 604 | SEQ ID NO: | R31Q K40Q H41Y M61S I74T N90V V129I S255V |
| | | | 14 (UniProt: | V288L K296R F345L F360Y A411V E424D H494P |
| | | | Q8GTB6) | A495E |
| t825109 | 463 | 605 | SEQ ID NO: | R31Q K40Q H41Y V46P Q58S I74T N90V V129I |
| | | | 14 (UniProt: | S255V V288L K296R F345L F360Y A411V E424D |
| | | | Q8GTB6) | T492N H494P A495E |

TABLE 19
Amino Acid Substitutions in Terminal Synthases Described in Example 5

| | Nucleic | | | |
|---|---|---|---|---|
| | acid | Amino | | |
| Strain | SEQ | acid SEQ | Reference | Amino Acid Substitutions Relative to |
| ID | ID NO: | ID NO: | Sequence ID | Reference Sequence |
| 865859 | 403 | 545 | SEQ ID NO: 13 | G95A T339E Q343E A414V |
| | | | (UniProt: | |
| | | | A6P6V9) | |
| 865977 | 418 | 560 | SEQ ID NO: 14 | R31Q H56N I74T N90V A250P S255V |
| | | | (UniProt: | Q475K T492N H494E A495E |
| | | | Q8GTB6) | |
| 923976 | 954 | 698 | SEQ ID NO: 14 | R31Q H56N Q58S I74T N90V A250P |
| | | | (UniProt: | S255V V288L F345L Q475K T492N |
| | | | Q8GTB6) | |
| 923759 | 955 | 699 | SEQ ID NO: 14 | R31Q V52I H56N Q58S M61S I74T |
| | | | (UniProt: | N90V A250P S255V F345L Q475K |
| | | | Q8GTB6) | T492N |
| 923624 | 956 | 700 | SEQ ID NO: 14 | R31Q H56N I74T N90V H143E A250P |
| | | | (UniProt: | S255V Q475K T492N |
| | | | Q8GTB6) | |
| 923980 | 957 | 701 | SEQ ID NO: 14 | R31Q H56N I74T N90V A250P S255V |
| | | | (UniProt: | L443I Q475K T492N |
| | | | Q8GTB6) | |
| 923922 | 958 | 702 | SEQ ID NO: 14 | H56N M61S N90V A250D S255V |
| | | | (UniProt: | V288L Q475K T492N A495E |
| | | | Q8GTB6) | |
| 923890 | 959 | 703 | SEQ ID NO: 14 | R31Q H56N I74T N90V K215R A250P |
| | | | (UniProt: | S255V Q475K T492N |
| | | | Q8GTB6) | |
| 923616 | 960 | 704 | SEQ ID NO: 14 | R31Q P49A H56N Q58S M61S I74T |
| | | | (UniProt: | N90VH143E A250P S255V V288L |
| | | | Q8GTB6) | F345L Q475K T492N |
| 923954 | 961 | 705 | SEQ ID NO: 14 | R31Q A47T H56N I74T N90V A250P |
| | | | (UniProt: | S255V Q475K T492N |
| | | | Q8GTB6) | |
| 923894 | 962 | 706 | SEQ ID NO: 14 | M61S N90V A250D S255V Q475K |
| | | | (UniProt: | T492N A495E N498T |
| | | | Q8GTB6) | |
| 923972 | 963 | 707 | SEQ ID NO: 14 | R31Q H56N M61S I74T N89H N90V |
| | | | (UniProt: | S100A H136R E150Q N196K N211D |
| | | | Q8GTB6) | A250P S255V V288M F345M S382K |
| | | | | L443I Q475K T492N |
| 923680 | 964 | 708 | SEQ ID NO: 14 | R31Q H56N Q58S M61S I74T N90V |
| | | | (UniProt: | H143E A250P S255V V288L T340E |
| | | | Q8GTB6) | F345L E424D Q475K T492N |
| 923918 | 965 | 709 | SEQ ID NO: 14 | R31Q H56N I74T S88L N90V A250P |
| | | | (UniProt: | S255V Q475K T492N |
| | | | Q8GTB6) | |
| 924465 | 966 | 710 | SBQ ID NO: 14 | R31Q V52I H56N Q58S M61S I74T |
| | | | (UniProt: | N90V H143E A250P S255V V288L |
| | | | Q8GTB6) | F345L Q475K T492N |
| 924725 | 967 | 711 | SEQ ID NO: 14 | R31Q H56N Q58S M61S I74T N90V |
| | | | (UniProt: | H143E A250P S255V V288L T340E |
| | | | Q8GTB6) | F345L E424D Q475K T492N P542L |
| 924927 | 968 | 712 | SEQ ID NO: 14 | R31Q H56N Q58S M61S I74T N90V |
| | | | (UniProt: | H143E A250P S255V V288L F345L |
| | | | Q8GTB6) | A411V Q475K T492N |
| 923908 | 969 | 713 | SEQ ID NO: 14 | R31Q V52I H56N Q58S M61S I74T |
| | | | (UniProt: | N90V A250P S255V V288L F345L |
| | | | Q8GTB6) | Q475K T492N |
| 923613 | 970 | 714 | SEQ ID NO: 14 | R31Q K50L H56N I74T N90V A250P |
| | | | (UniProt: | S255V Q475K T492N |
| | | | Q8GTB6) | |
| 924717 | 971 | 715 | SEQ ID NO: 14 | R31Q A47T V52I H56N Q58S M61S |
| | | | (UniProt: | I74T N90V H143E A250P S255V |
| | | | Q8GTB6) | V288L T340E F345L Q475K T492N |
| 924309 | 972 | 716 | SEQ ID NO: 14 | R31Q H56N M61S I74T N89H N90V |
| | | | (UniProt: | S100A N196K N211D A250P S255V |
| | | | Q8GTB6) | I257R V288M F345M S382K L443I |
| | | | | Q475K T492N |
| 923795 | 973 | 717 | SEQ ID NO: 14 | R31H M61S N90V A250D S255V |
| | | | (UniProt: | Q475K T492N A495E |
| | | | Q8GTB6) | |
| 923880 | 974 | 718 | SEQ ID NO: 14 | H56N Q58S M61S I74T N90V H143E |
| | | | (UniProt: | A250D S255V V288L F345L Q475K |
| | | | Q8GTB6) | T492N A495E |
| 924364 | 975 | 719 | SEQ ID NO: 14 | R31Q H56N Q58S M61S I74T N90V |
| | | | (UniProt: | H143E A250P S255V V288L Q475K |
| | | | Q8GTB6) | T492N |
| 924612 | 976 | 720 | SEQ ID NO: 14 | R31Q H56N I74T N89H N90V N196K |
| | | | (UniProt: | N211D A250P S255V F345M S382K |
| | | | Q8GTB6) | L443I Q475K T492N |
| 924164 | 977 | 721 | SEQ ID NO: 14 | R31Q H56N M61S I74T N89H N90V |
| | | | (UniProt: | S100A E150Q N196K N211D A250P |
| | | | Q8GTB6) | S255V I257R V288M F345M S382K |
| | | | | L443I Q475K T492N |
| 924803 | 978 | 722 | SEQ ID NO: 14 | R31Q H56N M61S I74T N89H N90V |
| | | | (UniProt: | S100A E150Q N196K N211D A250P |
| | | | Q8GTB6) | S255V V288M F345M S382K L443I |
| | | | | Q475K T492N |
| 924559 | 979 | 723 | SEQ ID NO: 14 | R31Q H56N I74T N90V A250P S255V |
| | | | (UniProt: | V288L Q475K T492N |
| | | | Q8GTB6) | |
| 924468 | 980 | 724 | SEQ ID NO: 14 | R31Q A47T H56N Q58S M61S I74T |
| | | | (UniProt: | N90V H143E A250P S255V V288L |
| | | | Q8GTB6) | T340E F345L E424D Q475K T492N |
| 923884 | 981 | 725 | SEQ ID NO: 14 | A47T H56N Q588 M61S I74T N90V |
| | | | (UniProt: | A250D S255V V288L T340E F345L |
| | | | Q8GTB6) | Q475K T492N |
| 924276 | 982 | 726 | SEQ ID NO: 14 | A47T H56N Q58S M61S I74T N90V |
| | | | (UniProt: | A250D S255V F345L E424D Q475K |
| | | | Q8GTB6) | T492N |
| 924665 | 983 | 727 | SEQ ID NO: 14 | R31Q H56N Q58S M61S I74T N90V |
| | | | (UniProt: | V129I H143E A250P S255V V288L |
| | | | Q8GTB6) | F345L E424D Q475K T492N |
| 924691 | 984 | 728 | SEQ ID NO: 14 | R31Q H56N M61S I74T N89H N90V |
| | | | (UniProt: | S100A N196K N211D A250P S255V |
| | | | Q8GTB6) | V288M F345M S382K L443I Q475K |
| | | | | T492N |
| 924639 | 985 | 729 | SEQ ID NO: 14 | R31Q H56N Q58S M61S I74T N90V |
| | | | (UniProt: | V129I H143E A250P S255V V288L |
| | | | Q8GTB6) | T340E F345L Q475K T492N |
| 924512 | 986 | 730 | SEQ ID NO: 14 | H56N Q58S M61S I74T N90V A250D |
| | | | (UniProt: | S255V V288L Q475K T492N |
| | | | Q8GTB6) | |
| 924723 | 987 | 731 | SEQ ID NO: 14 | H56N M61S I74T N90V H143E |
| | | | (UniProt: | A250D S255V V288L F345L Q475K |
| | | | Q8GTB6) | T492N |
| 923916 | 988 | 732 | SEQ ID NO: 14 | R31Q H56N Q58S M61S I74T N90V |
| | | | (UniProt: | H143E A250P S255V V288L F345L |
| | | | Q8GTB6) | E424D Q475K T492N |
| 924428 | 989 | 733 | SEQ ID NO: 14 | R31Q A47T H56N Q58S M61S I74T |
| | | | (UniProt: | N90V A250P S255V V288L T340E |
| | | | Q8GTB6) | F345L Q475K T492N |
| 924472 | 990 | 734 | SEQ ID NO: 14 | R31Q A47T H56N Q58S M61S I74T |
| | | | (UniProt: | N90V H143E A250P S255V V288L |
| | | | Q8GTB6) | T340E F345L Q475K T492N |
| 924609 | 991 | 735 | SEQ ID NO: 14 | R31Q H56N M61S I74T N90V A250P |
| | | | (UniProt: | S255V V288L T340E F345L Q475K |
| | | | Q8GTB6) | T492N |
| 924657 | 992 | 736 | SEQ ID NO: 14 | R31Q H56N I74T N90V A250P S255V |
| | | | (UniProt: | V288M Q475K T492N |
| | | | Q8GTB6) | |
| 924226 | 993 | 737 | SEQ ID NO: 14 | R31Q H56N Q58S M61S I74T N90V |
| | | | (UniProt: | V129I A250P S255V F345L Q475K |
| | | | Q8GTB6) | T492N |
| 924306 | 994 | 738 | SEQ ID NO: 14 | R31Q H56N I74T N90V N196K A250P |
| | | | (UniProt: | S255V Q475K T492N |
| | | | Q8GTB6) | |
| 924695 | 995 | 739 | SEQ ID NO: 14 | R31Q H56N M61S I74T N90V A250P |
| | | | (UniProt: | S255V T340E F345L E424D Q475K |
| | | | Q8GTB6) | T492N |
| 924162 | 996 | 740 | SEQ ID NO: 14 | H56N Q58S M61S I74T N90V A250D |
| | | | (UniProt: | S255V V288L T340E F345L Q475K |
| | | | Q8GTB6) | T492N A495E |
| 924387 | 997 | 741 | SEQ ID NO: 14 | A47T H56N Q58S M61S I74T N90V |
| | | | (UniProt: | A250D S255V F345L Q475K T492N |
| | | | Q8GTB6) | |
| 924667 | 998 | 742 | SEQ ID NO: 14 | H56N Q58S M61S I74T N90V A250D |
| | | | (UniProt: | S255V T340E F345L E424D Q475K |
| | | | Q8GTB6) | T492N |
| 924425 | 999 | 743 | SEQ ID NO: 14 | R31Q H56N I74T N90V A250P S255V |
| | | | (UniProt: | F345M Q475K T492N |
| | | | Q8GTB6) | |
| 924373 | 1000 | 744 | SEQ ID NO: 14 | H56N M61S I74T N90V A250D |
| | | | (UniProt: | S255V T340E F345L Q475K T492N |
| | | | Q8GTB6) | |
| 924212 | 1001 | 745 | SEQ ID NO: 14 | H56N M61S I74T N90V A250D |
| | | | (UniProt: | S255V V288L F345L Q475K T492N |
| | | | Q8GTB6) | |
| 924635 | 1002 | 746 | SEQ ID NO: 14 | H56N Q58S M61S I74T N90V H143E |
| | | | (UniProt: | A250D S255V F345L Q475K T492N |
| | | | Q8GTB6) | |
| 923912 | 1003 | 747 | SEQ ID NO: 14 | R31Q A47T H56N Q58S M61S I74T |
| | | | (UniProt: | N90V H143E A250P S255V V288L |
| | | | Q8GTB6) | F345L Q475K T492N |
| 924304 | 1004 | 748 | SEQ ID NO: 14 | R31Q H56N Q58S M61S I74T N90V |
| | | | (UniProt: | H143E A250P S255V V288L F345L |
| | | | Q8GTB6) | A411V E424D Q475K T492N |
| 924028 | 1005 | 749 | SEQ ID NO: 14 | R31Q H56N M61S I74T N90V A250P |
| | | | (UniProt: | S255V V288L F345L Q475K T492N |
| | | | Q8GTB6) | |
| 924426 | 1006 | 750 | SEQ ID NO: 14 | R31Q A47T H56N Q58S M61S I74T |
| | | | (UniProt: | N90V V129I A250P S255V V288L |
| | | | Q8GTB6) | T340E F345L E424D Q475K T492N |
| 924160 | 1007 | 751 | SEQ ID NO: 14 | R31Q H56N Q58S M61S I74T N90V |
| | | | (UniProt: | H143E A250P S255V T340E F345L |
| | | | Q8GTB6) | Q475K T492N |
| 924424 | 1008 | 752 | SEQ ID NO: 14 | A47T H56N Q58S M61S I74T N90V |
| | | | (UniProt: | H143E A250D S255V F345L E424D |
| | | | Q8GTB6) | Q475K T492N |
| 924431 | 1009 | 753 | SEQ ID NO: 14 | H56N M61S N90V A250D S255V |
| | | | (UniProt: | V288L F345L Q475K T492N A495E |
| | | | Q8GTB6) | |
| 924518 | 1010 | 754 | SEQ ID NO: 14 | P49A H56N Q58S M61S I74T N90V |
| | | | (UniProt: | H143E A250D S255V V288L F345L |
| | | | Q8GTB6) | Q475K T492N |
| 923771 | 1011 | 755 | SEQ ID NO: 14 | R31Q H56N Q58S M61S I74T N90V |
| | | | (UniProt: | A250P S255V V288L F345L A411V |
| | | | Q8GTB6) | Q475K T492N |
| 923744 | 1012 | 756 | SEQ ID NO: 14 | R31Q H56N Q58S M61S I74T N90V |
| | | | (UniProt; | A250P S255V V288L E424D Q475K |
| | | | Q8GTB6) | T492N |
| 924673 | 1013 | 757 | SEQ ID NO: 14 | R31Q H56N M61S I74T N90V A250P |
| | | | (UniProt: | S255V V288L Q475K T492N |
| | | | Q8GTB6) | |
| 924398 | 1014 | 758 | SEQ ID NO: 14 | H56N Q58S M61S I74T N90V A250D |
| | | | (UniProt: | S255V V288L F345L E424D Q475K |
| | | | Q8GTB6) | T492N A495E |
| 923948 | 1015 | 759 | SEQ ID NO: 14 | H56N Q58S M61S I74T N90V A250D |
| | | | (UniProt: | S255V V288L F345L E424D Q475K |
| | | | Q8GTB6) | T492N |
| 924062 | 1016 | 760 | SEQ ID NO: 14 | R31Q H56N M61S I74T N90V A250P |
| | | | (UniProt: | S255V F345L E424D Q475K T492N |
| | | | Q8GTB6) | |
| 923854 | 1017 | 761 | SEQ ID NO: 14 | R31Q H56N Q58S M61S I74T N90V |
| | | | (UniProt: | A250P S255V V288L Q475K T492N |
| | | | Q8GTB6) | |
| 923866 | 1018 | 762 | SEQ ID NO: 14 | H56N Q58S M61S I74T N90V A250D |
| | | | (UniProt: | S255V V288L Q475K T492N A495E |
| | | | Q8GTB6) | |
| 924645 | 1019 | 763 | SEQ ID NO: 14 | H56N M61S N90V A250D S255V |
| | | | (UniProt: | V288L F345L Q475K T492N |
| | | | Q8GTB6) | |
| 924649 | 1020 | 764 | SEQ ID NO: 14 | H56N Q58S M61S I74T N90V H143E |
| | | | (UniProt: | A250D S255V F345L E424D Q475K |
| | | | Q8GTB6) | T492N A495E |
| 923862 | 1021 | 765 | SEQ ID NO: 14 | R31Q A47T H56N Q58S M61S I74T |
| | | | (UniProt: | N90V H143E A250P S255V T340E |
| | | | Q8GTB6) | F345L Q475K T492N |
| 924699 | 1022 | 766 | SEQ ID NO: 14 | R31Q H56N M61S I74T N90V H143E |
| | | | (UniProt: | A250P S255V T340E F345L Q475K |
| | | | Q8GTB6) | T492N |
| 924417 | 1023 | 767 | SEQ ID NO: 14 | H56N M61S I74T N90V H143E |
| | | | (UniProt: | A250D S255V F345L Q475K T492N |
| | | | Q8GTB6) | |
| 924158 | 1024 | 768 | SEQ ID NO: 14 | R31Q P49A H56N Q58S M61S I74T |
| | | | (UniProt: | N90V V129I H143E A250P S255V |
| | | | Q8GTB6) | T340E F345L E424D Q475K T492N |
| 923840 | 1025 | 769 | SEQ ID NO: 14 | R31Q P49A H56N Q58S M61S I74T |
| | | | (UniProt: | N90V H143E A250P S255V T340E |
| | | | Q8GTB6) | F345L E424D Q475K T492N |
| 923758 | 1026 | 770 | SEQ ID NO: 14 | H56N M61S I74T N90V A250D |
| | | | (UniProt: | S255V V288L F345L Q475K T492N |
| | | | Q8GTB6) | A495E |
| 924719 | 1027 | 771 | SEQ ID NO: 14 | R31Q P49A H56N Q588 M61S I74T |
| | | | (UniProt: | N90V H143E A250P S255V F345L |
| | | | Q8GTB6) | Q475K T492N |
| 924006 | 1028 | 772 | SEQ ID NO: 14 | H56N Q58S M61S I74T N90V A250D |
| | | | (UniProt: | S255V V288L F345L Q475K T492N |
| | | | Q8GTB6) | |
| 924412 | 1029 | 773 | SEQ ID NO: 14 | R31Q A47T H56N Q58S M61S I74T |
| | | | (UniProt: | N90V H143E A250P S255V T340E |
| | | | Q8GTB6) | F345L E424D Q475K T492N |
| 924030 | 1030 | 774 | SEQ ID NO: 14 | H56N M61S N90V A250D S255V |
| | | | (UniProt: | F345L E424D Q475K T492N A495E |
| | | | Q8GTB6) | |
| 924094 | 1031 | 775 | SEQ ID NO: 14 | R31Q H56N Q58S M61S I74T N90V |
| | | | (UniProt: | A250P S255V T340E Q475K T492N |
| | | | Q8GTB6) | |
| 924484 | 1032 | 776 | SEQ ID NO: 14 | R31Q A47T H56N Q58S M61S I74T |
| | | | (UniProt: | N90V V129I H143E A250P S255V |
| | | | Q8GTB6) | V288L F345L B424D Q475K T492N |
| 924715 | 1033 | 777 | SEQ ID NO: 14 | H56N M61S N89H N90V S100A |
| | | | (UniProt: | E150Q N196K N211D A250D S255V |
| | | | Q8GTB6) | F345M L443I Q475K T492N A495E |
| 924576 | 1034 | 778 | SEQ ID NO: 14 | R31Q P49A H56N Q58S M61S I74T |
| | | | (UniProt: | N90VH143B A250P S255V V288L |
| | | | Q8GTB6) | T340E F345L E424D Q475K T492N |
| 924332 | 1035 | 779 | SEQ ID NO: 14 | R31Q H56N Q58S M61S I74T N90V |
| | | | (UniProt: | A250P S255V Q475K T492N |
| | | | Q8GTB6) | |
| 924298 | 1036 | 780 | SEQ ID NO: 14 | R31Q P49A H56N Q58S M61S I74T |
| | | | (UniProt: | N90V A250P S255V Q475K T492N |
| | | | Q8GTB6) | |
| 924083 | 1037 | 781 | SEQ ID NO: 14 | R31Q H56N Q58S M61S I74T N90V |
| | | | (UniProt: | H143E A250P S255V V288L T340E |
| | | | Q8GTB6) | F345L A411V E424D Q475K T492N |
| 924847 | 1038 | 782 | SEQ ID NO: 14 | R31Q H56N M61S I74T N90V H143E |
| | | | (UniProt: | A250P S255V V288L F345L Q475K |
| | | | Q8GTB6) | T492N |
| 924322 | 1039 | 783 | SEQ ID NO: 14 | H56N Q58S M61S I74T N90V A250D |
| | | | (UniProt: | S255V V288L T340E F345L E424D |
| | | | Q8GTB6) | Q475K T492N |
| 923811 | 1040 | 784 | SEQ ID NO: 13 | G95A N196K T339E Q343E A414V |
| | | | (UniProt: | |
| | | | A6P6V9) | |
| 924707 | 1041 | 785 | SEQ ID NO: 14 | H56N Q588 M618 N90V A250D |
| | | | (UniProt: | S255V T340E F345L Q475K T492N |
| | | | Q8GTB6) | A495E |
| 924928 | 1042 | 786 | SEQ ID NO: 13 | G95A E150Q V162I C180G N196K |
| | | | (UniProt: | N211D N273H T339E Q343E A414V |
| | | | A6P6V9) | |
| 923848 | 1043 | 787 | SEQ ID NO: 14 | R31Q H56N I74T N90V A250P S255V |
| | | | (UniProt: | T340E F345L Q475K T492N |
| | | | Q8GTB6) | |
| 924266 | 1044 | 788 | SEQ ID NO: 14 | R31Q H56N Q58S M61S I74T N90V |
| | | | (UniProt: | H143E A250P S255V Q475K T492N |
| | | | Q8GTB6) | |
| 924661 | 1045 | 789 | SEQ ID NO: 14 | R31Q H56N M61S I74T N90V H143E |
| | | | (UniProt: | A250P S255V V288L F345L E424D |
| | | | Q8GTB6) | Q475K T492N |
| 924744 | 1046 | 790 | SEQ ID NO: 13 | G95A S116A T339E Q343E A414V |
| | | | (UniProt: | N527D |
| | | | A6P6V9) | |
| 924748 | 1047 | 791 | SEQ ID NO: 13 | G95A Y175F T339E Q343E A414V |
| | | | (UniProt: | |
| | | | A6P6V9) | |
| 924828 | 1048 | 792 | SEQ ID NO: 13 | G95A H213N T339E Q343E L344M |
| | | | (UniProt: | A414V N527D |
| | | | A6P6V9) | |
| 924492 | 1049 | 793 | SEQ ID NO: 14 | R31Q V52I H56N M61S I74T N90V |
| | | | (UniProt: | A250P S255V Q475K T492N |
| | | | Q8GTB6) | |
| 923695 | 1050 | 794 | SEQ ID NO: 13 | G95A S116A T339E Q343E L344M |
| | | | (UniProt; | A414V N527D |
| | | | A6P6V9) | |
| 924932 | 1051 | 795 | SEQ ID NO: 13 | S116A H213N T339E Q343E L344M |
| | | | (UniProt: | N527D |
| | | | A6P6V9) | |
| 924446 | 1052 | 796 | SEQ ID NO: 14 | R31Q P49A H56N Q58S M61S I74T |
| | | | (UniProt: | N90V A250P S255V V288L F345L |
| | | | Q8GTB6) | E424D Q475K T492N |
| 924348 | 1053 | 797 | SEQ ID NO: 14 | P49A H56N Q58S M61S I74T N90V |
| | | | (UniProt: | H143E A250D S255V T340E F345L |
| | | | Q8GTB6) | Q475K T492N |
| 923786 | 1054 | 798 | SEQ ID NO: 13 | G95A S116A H213N T339E Q343E |
| | | | (UniProt: | L344M A414V N527D |
| | | | A6P6V9) | |
| 924942 | 1055 | 799 | SEQ ID NO: 13 | G95A T339E Q343E Y353M A414V |
| | | | (UniProt: | |
| | | | A6P6V9) | |
| 923960 | 1056 | 800 | SEQ ID NO: 13 | K50N G95A V103H E150Q V162I |
| | | | (UniProt: | C180G N196K N211D H213N T339E |
| | | | A6P6V9) | Q343E L344M A414V |
| 924284 | 1057 | 801 | SEQ ID NO: 13 | G95A T339E Q343E A414V L442I |
| | | | (UniProt: | |
| | | | A6P6V9) | |
| 924502 | 1058 | 802 | SEQ ID NO: 14 | R31Q K36H H56N I74T N90V A250P |
| | | | (UniProt: | S255V Q475K T492N |
| | | | Q8GTB6) | |
| 923727 | 1059 | 803 | SEQ ID NO: 13 | G95A T339E Q343E F380Y A414V |
| | | | (UniProt: | |
| | | | A6P6V9) | |
| 924413 | 1060 | 804 | SEQ ID NO: 13 | K50N G95A H213N T339E Q343E |
| | | | (UniProt: | L344M A414V N527D |
| | | | A6P6V9) | |
| 924406 | 1061 | 805 | SEQ ID NO: 14 | M61S N90V N196K A250D S255V |
| | | | (UniProt: | Q475K T492N A495E |
| | | | Q8GTB6) | |
| 924843 | 1062 | 806 | SEQ ID NO: 13 | G95A L230I T339E Q343E A414V |
| | | | (UniProt: | |
| | | | A6P6V9) | |
| 924965 | 1063 | 807 | SEQ ID NO: 13 | K50N G95A E150Q V162I C180G |
| | | | (UniProt: | N196K N211D H213N T339E Q343E |
| | | | A6P6V9) | L344M A414V |
| 924864 | 1064 | 808 | SEQ ID NO: 13 | K50N G95A H213N T339E Q343E |
| | | | (UniProt: | L344M A414V C446T |
| | | | A6P6V9) | |
| 924940 | 1065 | 809 | SEQ ID NO: 13 | K50N G95A N196K H213N T339E |
| | | | (UniProt: | Q343E L344M A414V |
| | | | A6P6V9) | |
| 923653 | 1066 | 810 | SEQ ID NO: 13 | G95A S116A H213N T339E Q343E |
| | | | (UniProt: | L344M A414V |
| | | | A6P6V9) | |
| 923780 | 1067 | 811 | SEQ ID NO: 14 | R31Q H56N M61S I74T N90V A250P |
| | | | (UniProt: | S255V V288L F345L E424D Q475K |
| | | | Q8GTB6) | T492N |
| 923850 | 1068 | 812 | SEQ ID NO: 13 | S116A H213N T339E Q343E N527D |
| | | | (UniProt: | |
| | | | A6P6V9) | |
| 923957 | 1069 | 813 | SEQ ID NO: 13 | G95A T339E Q343E L344M A414V |
| | | | (UniProt: | N527D |
| | | | A6P6V9) | |
| 924836 | 1070 | 814 | SEQ ID NO: 13 | K50N H69Q G95A S100A H213N |
| | | | (UniProt: | T339E Q343E L344M A414V |
| | | | A6P6V9) | |
| 924642 | 1071 | 815 | SEQ ID NO: 13 | G95A N211D T339E Q343E A414V |
| | | | (UniProt: | |
| | | | A6P6V9) | |
| 924888 | 1072 | 816 | SEQ ID NO: 13 | K50N E150Q V162I C180G N196K |
| | | | (UniProt: | N211D H213N T339E Q343E L344M |
| | | | A6P6V9) | |
| 923910 | 1073 | 817 | SEQ ID NO: 13 | S116A T339E Q343E N527D |
| | | | (UniProt: | |
| | | | A6P6V9) | |
| 924618 | 1074 | 818 | SEQ ID NO: 13 | S116A T339E Q343E L344M N527D |
| | | | (UniProt: | |
| | | | A6P6V9) | |
| 923896 | 1075 | 819 | SEQ ID NO: 13 | K50N G95A V162I C180G N196K |
| | | | (UniProt: | N211D H213N T339E Q343EL344M |
| | | | A6P6V9) | A414V |
| 924760 | 1076 | 820 | SEQ ID NO: 13 | K50N G95A S100A H213N T339E |
| | | | (UniProt: | Q343E L344M A414V N527D |
| | | | A6P6V9) | |
| 923899 | 1077 | 821 | SEQ ID NO: 13 | K50N H69Q G95A S100A H213N |
| | | | (UniProt: | T339E Q343E L344M A414V N527D |
| | | | A6P6V9) | |
| 924436 | 1078 | 822 | SEQ ID NO: 14 | R31Q K36Q H56N I74T N90V A250P |
| | | | (UniProt: | S255V Q475K T492N |
| | | | Q8GTB6) | |
| 924890 | 1079 | 823 | SEQ ID NO: 13 | K50N V162I C180G N196K N211D |
| | | | (UniProt: | H213N T339E Q343E L344M |
| | | | A6P6V9) | |
| 924240 | 1080 | 824 | SEQ ID NO: 14 | R31Q H56N L59F I74T N90V A250P |
| | | | (UniProt: | S255V Q475K T492N |
| | | | Q8GTB6) | |
| 924108 | 1081 | 825 | SEQ ID NO: 13 | K50N E150Q V162I A172P C180G |
| | | | (UniProt: | N196K N211D H213N T339E Q343E |
| | | | A6P6V9) | L344M |
| 924586 | 1082 | 826 | SEQ ID NO: 14 | R31Q H56N I74T N90V A250P S255V |
| | | | (UniProt: | V288L F345L Q475K T492N |
| | | | Q8GTB6) | |
| 924114 | 1083 | 827 | SEQ ID NO: 13 | K50N S100A S116A H213N T339E |
| | | | (UniProt: | Q343E L344M N527D |
| | | | A6P6V9) | |
| 924051 | 1084 | 828 | SEQ ID NO: 13 | G95A H213N T339E Q343E A414V |
| | | | (UniProt: | N527D |
| | | | A6P6V9) | |
| 924765 | 1085 | 829 | SEQ ID NO: 13 | K50N G95A S100A E150Q V162I |
| | | | (UniProt: | C180G N196K N211D H213N S322E |
| | | | A6P6V9) | T339E Q343E L344M A414V E452T |
| | | | | I504Q |
| 924801 | 1086 | 830 | SEQ ID NO: 13 | K50N G95A E150Q H213N T339E |
| | | | (UniProt: | Q343E L344M A414V |
| | | | A6P6V9) | |
| 924264 | 1087 | 831 | SEQ ID NO: 13 | G95A T339E Q343E L344M A414V |
| | | | (UniProt: | |
| | | | A6P6V9) | |
| 923611 | 1088 | 832 | SEQ ID NO: 13 | K50N G95A S100A V103H E150Q |
| | | | (UniProt; | V162I C180G N196K N211D H213N |
| | | | A6P6V9) | S322E T339E Q343E L344M A414V |
| | | | | E452T I504Q |
| 924640 | 1089 | 833 | SEQ ID NO: 13 | K50N G95A N211D H213N T339E |
| | | | (UniProt: | Q343E L344M A414V |
| | | | A6P6V9) | |
| 924747 | 1090 | 834 | SEQ ID NO: 13 | G95A T339E Q343E Q376V A414V |
| | | | (UniProt: | |
| | | | A6P6V9) | |
| 924912 | 1091 | 835 | SEQ ID NO: 13 | K50N H69Q G95A H213N T339E |
| | | | (UniProt: | Q343E L344M A414V N527D |
| | | | A6P6V9) | |
| 924767 | 1092 | 836 | SEQ ID NO: 13 | V162I C180G N196K N211D N273H |
| | | | (UniProt: | T339E Q343E |
| | | | A6P6V9) | |
| 924524 | 1093 | 837 | SEQ ID NO: 14 | H56N Q58S M61S N90V A250D |
| | | | (UniProt: | S255V Q475K T492N |
| | | | Q8GTB6) | |
| 924381 | 1094 | 838 | SEQ ID NO: 13 | G95A E150Q T339E Q343E A414V |
| | | | (UniProt: | |
| | | | A6P6V9) | |
| 924946 | 1095 | 839 | SEQ ID NO: 13 | K50N G95A S116A H213N T339E |
| | | | (UniProt: | Q343E A414V |
| | | | A6P6V9) | |
| 924945 | 1096 | 840 | SEQ ID NO: 13 | K50N H69Q G95A S100A S116A |
| | | | (UniProt: | H213N T339E Q343B L344M A414V |
| | | | A6P6V9) | N527D |
| 924764 | 1097 | 841 | SEQ ID NO: 13 | G95A T339E Q343E Q376R A414V |
| | | | (UniProt; | |
| | | | A6P6V9) | |
| 924378 | 1098 | 842 | SEQ ID NO: 13 | K50N G95A H213N T339E Q343E |
| | | | (UniProt: | L344M A414V L415M |
| | | | A6P6V9) | |
| 865957 | 1099 | 843 | SEQ ID NO: 13 | G95A H213N Q343E A414V |
| | | | (UniProt: | |
| | | | A6P6V9) | |
| 924716 | 1100 | 844 | SEQ ID NO: 13 | K50N G95A V103H H213N T339E |
| | | | (UniProt: | Q343E L344M A414V |
| | | | A6P6V9) | |
| 924528 | 1101 | 845 | SEQ ID NO: 13 | G95A H213N T339E Q343E L344M |
| | | | (UniProt: | A414V |
| | | | A6P6V9) | |
| 923805 | 1102 | 846 | SEQ ID NO: 13 | K50N G95A Y175F H213N T339E |
| | | | (UniProt: | Q343E L344M A414V |
| | | | A6P6V9) | |
| 924856 | 1103 | 847 | SEQ ID NO: 13 | N211D T339E Q343E |
| | | | (UniProt: | |
| | | | A6P6V9) | |
| 923765 | 1104 | 848 | SEQ ID NO: 13 | G95A S100A T339E Q343E A414V |
| | | | (UniProt: | |
| | | | A6P6V9) | |
| 924112 | 1105 | 849 | SEQ ID NO: 13 | K50N N196K H213N T339E Q343E |
| | | | (UniProt: | L344M |
| | | | A6P6V9) | |
| 924253 | 1106 | 850 | SEQ ID NO: 13 | K50N G95A H213N T339E Q343E |
| | | | (UniProt; | L344M A414V N527D |
| | | | A6P6V9) | |
| 924246 | 1107 | 851 | SEQ ID NO: 13 | G95A T339E Q343E A414V H542M |
| | | | (UniProt: | |
| | | | A6P6V9) | |
| 923672 | 1108 | 852 | SEQ ID NO: 13 | K50N G95A H213N T290A T339E |
| | | | (UniProt: | Q343E L344M A414V |
| | | | A6P6V9) | |
| 924957 | 1109 | 853 | SEQ ID NO: 13 | K50N H213NL2301 T339E Q343E |
| | | | (UniProt: | L344M |
| | | | A6P6V9) | |
| 924497 | 1110 | 854 | SEQ ID NO: 13 | G95A A172P T339E Q343E A414V |
| | | | (UniProt: | |
| | | | A6P6V9) | |
| 923818 | 1111 | 855 | SEQ ID NO: 13 | K50N G95A H213N T339E Q343E |
| | | | (UniProt: | A414V N527D |
| | | | A6P6V9) | |
| 923807 | 1112 | 856 | SEQ ID NO: 13 | G95A T339E Q343E Q376T A414V |
| | | | (UniProt: | |
| | | | A6P6V9) | |
| 924909 | 1113 | 857 | SEQ ID NO: 13 | G95A T339E Q343E A414V A479S |
| | | | (UniProt: | |
| | | | A6P6V9) | |
| 923942 | 1114 | 858 | SEQ ID NO: 13 | S116A H213N T339E Q343E |
| | | | (UniProt: | |
| | | | A6P6V9) | |
| 924745 | 1115 | 859 | SEQ ID NO: 13 | K50N H89Q G95A H213N T339E |
| | | | (UniProt: | Q343E L344M A414V |
| | | | A6P6V9) | |
| 924131 | 1116 | 860 | SEQ ID NO: 13 | G95A T339E Q343E A414V L481Y |
| | | | (UniProt: | |
| | | | A6P6V9) | |
| 924110 | 1117 | 861 | SEQ ID NO: 13 | K50N H69Q S100A H213N T339E |
| | | | (UniProt: | Q343E L344M N527D |
| | | | A6P6V9) | |
| 924227 | 1118 | 862 | SEQ ID NO: 13 | K50N H69Q S100A H213N T339E |
| | | | (UniProt: | Q343E L344M |
| | | | A6P6V9) | |
| 924978 | 1119 | 863 | SEQ ID NO: 13 | K50N G95A H213N T339E Q343E |
| | | | (UniProt: | L344M A414V D492N N527D |
| | | | A6P6V9) | |
| 923657 | 1120 | 864 | SEQ ID NO: 13 | G95A V216L T339E Q343E A414V |
| | | | (UniProt: | |
| | | | A6P6V9) | |
| 924139 | 1121 | 865 | SEQ ID NO: 13 | K50N S116A T339E Q343E N527D |
| | | | (UniProt: | |
| | | | A6P6V9) | |
| 924688 | 1122 | 866 | SEQ ID NO: 13 | K50N G95A H213N T339E Q343E |
| | | | (UniProt: | L344M N377P A414V |
| | | | A6P6V9) | |
| 924400 | 1123 | 867 | SEQ ID NO: 13 | G95A T339E Q343E A414V L481V |
| | | | (UniProt: | |
| | | | A6P6V9) | |
| 923726 | 1124 | 868 | SEQ ID NO: 13 | N196K T339E Q343E |
| | | | (UniProt: | |
| | | | A6P6V9) | |
| 924898 | 1125 | 869 | SEQ ID NO: 13 | T339E Q343E F380Y |
| | | | (UniProt; | |
| | | | A6P6V9) | |
| 923697 | 1126 | 870 | SEQ ID NO: 13 | K50N G95A T339E Q343E A414V |
| | | | (UniProt: | N527D |
| | | | A6P6V9) | |
| 924969 | 1127 | 871 | SEQ ID NO: 13 | G95A T339E Q343E A414V Y418F |
| | | | (UniProt: | |
| | | | A6P6V9) | |
| 923723 | 1128 | 872 | SEQ ID NO: 13 | G95A S322E T339E Q343E A414V |
| | | | (UniProt: | |
| | | | A6P6V9) | |
| 924167 | 1129 | 873 | SEQ ID NO: 13 | K50N S116A H213N T339E Q343E |
| | | | (UniProt: | L344M N527D |
| | | | A6P6V9) | |
| 924660 | 1130 | 874 | SEQ ID NO: 13 | T339E Q343E L344M N527D |
| | | | (UniProt: | |
| | | | A6P6V9) | |
| 923675 | 1131 | 875 | SEQ ID NO: 13 | K50N G95A H213N T290M T339E |
| | | | (UniProt: | Q343E L344M A414V |
| | | | A6P6V9) | |
| 924766 | 1132 | 876 | SEQ ID NO: 13 | G95A T339E Q343E Q376S A414V |
| | | | (UniProt: | |
| | | | A6P6V9) | |
| 924261 | 1133 | 877 | SEQ ID NO: 13 | H213N T339E Q343E L344M N527D |
| | | | (UniProt: | |
| | | | A6P6V9) | |
| 924962 | 1134 | 878 | SEQ ID NO: 13 | G95A N273H T339E Q343E A414V |
| | | | (UniProt: | |
| | | | A6P6V9) | |
| 924743 | 1135 | 879 | SEQ ID NO: 13 | G95A T339E Q343E A414V L481M |
| | | | (UniProt: | |
| | | | A6P6V9) | |
| 924900 | 1136 | 880 | SEQ ID NO: 13 | K50N G95A H213N T339E Q343E |
| | | | (UniProt: | L344M F352Y A414V |
| | | | A6P6V9) | |
| 924384 | 1137 | 881 | SEQ ID NO: 13 | K50N G95A T339E Q343E A414V |
| | | | (UniProt: | |
| | | | A6P6V9) | |
| 924622 | 1138 | 882 | SEQ ID NO: 13 | K50N G95A H213N T339E Q343E |
| | | | (UniProt: | L344M A414V 1445V |
| | | | A6P6V9) | |
| 924604 | 1139 | 883 | SEQ ID NO: 13 | T339E Q343E L442I |
| | | | (UniProt: | |
| | | | A6P6V9) | |
| 924433 | 1140 | 884 | SEQ ID NO: 14 | R31Q H56N Q58S M61S I74T N90V |
| | | | (UniProt: | A250P S255V V288L F345L E424D |
| | | | Q8GTB6) | Q475K T492N |
| 924487 | 1141 | 885 | SEQ ID NO: 14 | R31Q A47T H56N Q58S M61S I74T |
| | | | (UniProt: | N90V A250P S255V T340E F345L |
| | | | Q8GTB6) | E424D Q475K T492N |
| 924548 | 1142 | 886 | SEQ ID NO: 14 | R31Q H56N Q58S M61S I74T N90V |
| | | | (UniProt: | H143E A250P S255V V288L T340E |
| | | | Q8GTB6) | F345L Q475K T492N |
| 924829 | 1143 | 887 | SEQ ID NO: 14 | R31Q H56N M61S I74T N90V A250P |
| | | | (UniProt: | S255V T340E F345L Q475K T492N |
| | | | Q8GTB6) | |
| 924835 | 1144 | 888 | SEQ ID NO: 14 | R31Q A47T H56N M61S I74T N90V |
| | | | (UniProt: | A250P S255V F345L Q475K T492N |
| | | | Q8GTB6) | |
| 924851 | 1145 | 889 | SEQ ID NO: 14 | R31Q H56N Q58S M61S I74T N90V |
| | | | (UniProt: | A250P S255V F345L E424D Q475K |
| | | | Q8GTB6) | T492N |
| 924555 | 1146 | 890 | SEQ ID NO: 14 | A47T H56N Q58S M61S I74T N90V |
| | | | (UniProt: | A250D S255V V288L F345L Q475K |
| | | | Q8GTB6) | T492N |
| 923609 | 1147 | 891 | SEQ ID NO: 14 | H56N Q588 M61S I74T N90V H143E |
| | | | (UniProt: | A250D S255V V288L F345L Q475K |
| | | | Q8GTB6) | T492N |
| 924552 | 1148 | 892 | SEQ ID NO: 14 | H56N Q58S M61S I74T N90V H143E |
| | | | (UniProt: | A250D S255V T340E F345L Q475K |
| | | | Q8GTB6) | T492N |
| 924683 | 1149 | 893 | SEQ ID NO: 14 | R31Q H56N Q58S M61S I74T N90V |
| | | | (UniProt: | A250P S255V F345L A411V Q475K |
| | | | Q8GTB6) | T492N |
| 924455 | 1150 | 894 | SEQ ID NO: 14 | H56N M61S N89H N90V S100A |
| | | | (UniProt: | E150Q N196K N211D A250D S255V |
| | | | Q8GTB6) | N274H F345M Q475K T492N A495E |
| 924587 | 1151 | 895 | SEQ ID NO: 14 | R31Q H56N Q58S M61S I74T N90V |
| | | | (UniProt: | H143E A250P S255V V288L F345L |
| | | | Q8GTB6) | Q475K T492N |
| 924580 | 1152 | 896 | SEQ ID NO: 14 | V52I H56N Q58S M61S I74T N90V |
| | | | (UniProt: | A250D S255V V288L F345L Q475K |
| | | | Q8GTB6) | T492N |
| 924811 | 1153 | 897 | SEQ ID NO: 14 | R31Q H56N M61S I74T N90V H143E |
| | | | (UniProt: | A250P S255V F345L Q475K T492N |
| | | | Q8GTB6) | |
| 924855 | 1154 | 898 | SEQ ID NO: 14 | R31Q H56N Q58S M61S I74T N90V |
| | | | (UniProt: | H143E A250P S255V F345L B424D |
| | | | Q8GTB6) | Q475K T492N |
| 924218 | 1155 | 899 | SEQ ID NO: 14 | R31Q P49A H56N Q58S M61S I74T |
| | | | (UniProt: | N90V A250P S255V V288L T340E |
| | | | Q8GTB6) | F345L E424D Q475K T492N |
| 924214 | 1156 | 900 | SEQ ID NO: 14 | R31Q V52I H56N M61S I74T N90V |
| | | | (UniProt: | A250P S255V F345L Q475K T492N |
| | | | Q8GTB6) | |
| 924459 | 1157 | 901 | SEQ ID NO: 14 | A47T H56N Q58S M61S I74T N90V |
| | | | (UniProt: | H143E A250D S255V V288L F345L |
| | | | Q8GTB6) | Q475K T492N |
| 924520 | 1158 | 902 | SEQ ID NO: 14 | R31Q V52I H56N Q58S M61S I74T |
| | | | (UniProt: | N90V H143E A250P S255V V288L |
| | | | Q8GTB6) | T340E F345L E424D Q475K T492N |
| 924346 | 1159 | 903 | SEQ ID NO: 14 | R31Q H56N Q58S M61S I74T N90V |
| | | | (UniProt: | A250P S255V F345L Q475K T492N |
| | | | Q8GTB6) | |
| 923784 | 1160 | 904 | SEQ ID NO: 14 | A47T H56N Q588 M61S I74T N90V |
| | | | (UniProt: | H143E A250D S255V T340E F345L |
| | | | Q8GTB6) | Q475K T492N |
| 924681 | 1161 | 905 | SEQ ID NO: 14 | H56N Q58S M61S N90V A250D |
| | | | (UniProt: | S255V V288L F345L Q475K T492N |
| | | | Q8GTB6) | A495E |
| 924585 | 1162 | 906 | SEQ ID NO: 14 | A47T H56N Q58S M61S I74T N90V |
| | | | (UniProt: | H143E A250D S255V F345L Q475K |
| | | | Q8GTB6) | T492N |
| 924522 | 1163 | 907 | SEQ ID NO: 14 | H56N Q58S M61S I74T N90V H143E |
| | | | (UniProt: | A250D S255V V288L T340E F345L |
| | | | Q8GTB6) | E424D Q475K T492N A495E |
| 924262 | 1164 | 908 | SEQ ID NO: 14 | H56N Q58S M61S N90V A250D |
| | | | (UniProt: | S255V T340E F345L Q475K T492N |
| | | | Q8GTB6) | |
| 924693 | 1165 | 909 | SEQ ID NO: 14 | R3IQ P49A H56N Q58S M61S I74T |
| | | | (UniProt: | N90V A250P S255V T340E F345L |
| | | | Q8GTB6) | E424D Q475K T492N |
| 924686 | 1166 | 910 | SEQ ID NO: 14 | R31Q H56N Q58S I74T N90V H143E |
| | | | (UniProt: | A250P S255V F345L Q475K T492N |
| | | | Q8GTB6) | |
| 924583 | 1167 | 911 | SEQ ID NO: 14 | R31Q H56N I74T N90V A250P S255V |
| | | | (UniProt: | F345L E424D Q475K T492N |
| | | | Q8GTB6) | |
| 924595 | 1168 | 912 | SEQ ID NO: 14 | H56N Q58S M61S I74T N90V H143E |
| | | | (UniProt: | A250D S255V V288L F345L E424D |
| | | | Q8GTB6) | Q475K T492N A495E |
| 924867 | 1169 | 913 | SEQ ID NO: 13 | K50N G95A H213N T339E Q343E |
| | | | (UniProt: | L344M A414V |
| | | | A6P6V9) | |
| 924407 | 1170 | 914 | SEQ ID NO: 13 | V90C G95A T339E Q343E A414V |
| | | | (UniProt: | |
| | | | A6P6V9) | |
| 924352 | 1171 | 915 | SEQ ID NO: 13 | G95A V103H. T339E Q343E A414V |
| | | | (UniProt: | |
| | | | A6P6V9) | |
| 923928 | 1172 | 916 | SEQ ID NO: 13 | K50N G95A H213N T339E Q343E |
| | | | (UniProt: | L344M A414V C446V |
| | | | A6P6V9) | |
| 923647 | 1173 | 917 | SEQ ID NO: 13 | G95A C180G T339E Q343E A414V |
| | | | (UniProt: | |
| | | | A6P6V9) | |
| 924808 | 1174 | 918 | SEQ ID NO: 13 | G95A T339E Q343E A414V F467Y |
| | | | (UniProt: | |
| | | | A6P6V9) | |
| 924500 | 1175 | 919 | SEQ ID NO: 13 | G95A T339E Q343E Q376A A414V |
| | | | (UniProt: | |
| | | | A6P6V9) | |
| 923917 | 1176 | 920 | SEQ ID NO: 13 | K50N G95A H213N L230I T339E |
| | | | (UniProt: | Q343E L344M A414V |
| | | | A6P6V9) | |
| 923694 | 1177 | 921 | SEQ ID NO: 13 | G95A T339E Q343E Y386F A414V |
| | | | (UniProt: | |
| | | | A6P6V9) | |
| 923924 | 1178 | 922 | SEQ ID NO: 13 | K50N G95A S100A H213N T339E |
| | | | (UniProt: | Q343E L344M A414V D492N N527D |
| | | | A6P6V9) | |
| 923610 | 1179 | 923 | SEQ ID NO: 13 | G95A T339E Q343E A414V Y416I |
| | | | (UniProt: | |
| | | | A6P6V9) | |
| 923851 | 1180 | 924 | SEQ ID NO: 13 | K50N G95A H213N T339E Q343E |
| | | | (UniProt: | L344M A414V L442I |
| | | | A6P6V9) | |
| 923679 | 1181 | 925 | SEQ ID NO: 13 | G95A V162I T339E Q343E A414V |
| | | | (UniProt: | |
| | | | A6P6V9) | |
| 923806 | 1182 | 926 | SEQ ID NO: 13 | K50N G95A L171F H213N T339E |
| | | | (UniProt: | Q343E L344M A414V |
| | | | A6P6V9) | |
| 923603 | 1183 | 927 | SEQ ID NO: 13 | G95A T339B Q343B Q376N A414V |
| | | | (UniProt: | |
| | | | A6P6V9) | |
| 923870 | 1184 | 928 | SEQ ID NO: 13 | G95A Q124M T339E Q343E A414V |
| | | | (UniProt: | |
| | | | A6P6V9) | |
| 923836 | 1185 | 929 | SEQ ID NO: 13 | K50N G95A H213N F292M T339E |
| | | | (UniProt: | Q343B L344M A414V |
| | | | A6P6V9) | |
| 923935 | 1186 | 930 | SEQ ID NO: 13 | K50N G95A H213N T339E Q343E |
| | | | (UniProt: | A414V |
| | | | A6P6V9) | |
| 923946 | 1187 | 931 | SEQ ID NO: 13 | K50N G95A H213N T339E Q343E |
| | | | (UniProt: | L344M A414V L481I |
| | | | A6P6V9) | |
| 923617 | 1188 | 932 | SEQ ID NO: 13 | P79G G95A T339E Q343E A414V |
| | | | (UniProt: | |
| | | | A6P6V9) | |
| 924979 | 1189 | 933 | SEQ ID NO: 13 | K50N G95A H213N T339E Q343E |
| | | | (UniProt: | L344M Y386F A414V |
| | | | A6P6V9) | |
| 924920 | 1190 | 934 | SEQ ID NO: 13 | K50N G95A H213N T339E Q343E |
| | | | (UniProt: | L344M N377F A414V |
| | | | A6P6V9) | |
| 924960 | 1191 | 935 | SEQ ID NO: 13 | K50N G95A H213N T339E Q343E |
| | | | (UniProt: | L344M A414V I504Q |
| | | | A6P6V9) | |
| 924684 | 1192 | 936 | SEQ ID NO: 13 | K50N G95A H213N T339E Q343E |
| | | | (UniProt: | L344M A414V L486V |
| | | | A6P6V9) | |
| 924908 | 1193 | 937 | SEQ ID NO: 13 | K50N G95A H213N T339E Q343E |
| | | | (UniProt: | L344M N377R A414V |
| | | | A6P6V9) | |
| 924652 | 1194 | 938 | SEQ ID NO: 13 | K50N G95A H184F H213N T339E |
| | | | (UniProt: | Q343B L344M A414V |
| | | | A6P6V9) | |
| 924778 | 1195 | 939 | SEQ ID NO: 13 | L230I T339E Q343E |
| | | | (UniProt: | |
| | | | A6P6V9) | |
| 924800 | 1196 | 940 | SEQ ID NO: 13 | G95A T339E Q343E |
| | | | (UniProt: | |
| | | | A6P6V9) | |
| 923978 | 1197 | 941 | SEQ ID NO: 13 | K50N T339E Q343E L344M N527D |
| | | | (UniProt: | |
| | | | A6P6V9) | |
| 924812 | 1198 | 942 | SEQ ID NO: 13 | T339E Q343E A479T |
| | | | (UniProt: | |
| | | | A6P6V9) | |
| 923953 | 1199 | 943 | SEQ ID NO: 13 | S116A T339E Q343E |
| | | | (UniProt: | |
| | | | A6P6V9) | |
| 923955 | 1200 | 944 | SEQ ID NO: 13 | K50N S116A T339E Q343E L344M |
| | | | (UniProt: | N527D |
| | | | A6P6V9) | |
| 923974 | 1201 | 945 | SEQ ID NO: 13 | K50N H213N T339E Q343E L344M |
| | | | (UniProt: | N527D |
| | | | A6P6V9) | |
| 924746 | 1202 | 946 | SEQ ID NO: 13 | V216L T339E Q343E |
| | | | (UniProt: | |
| | | | A6P6V9) | |
| 924910 | 1203 | 947 | SEQ ID NO: 13 | T339E Q343E Q376G |
| | | | (UniProt: | |
| | | | A6P6V9) | |
| 924922 | 1204 | 948 | SEQ ID NO: 13 | S100A T339B Q343B |
| | | | (UniProt: | |
| | | | A6P6V9) | |
| 924929 | 1205 | 949 | SEQ ID NO: 13 | T339E Q343E Q376P |
| | | | (UniProt: | |
| | | | A6P6V9) | |
| 924961 | 1206 | 950 | SEQ ID NO: 13 | T339E Q343E E452T |
| | | | (UniProt: | |
| | | | A6P6V9) | |
| 924972 | 1207 | 951 | SEQ ID NO: 13 | T339E Q343E Q376T |
| | | | (UniProt: | |
| | | | A6P6V9) | |
| 924973 | 1208 | 952 | SEQ ID NO: 13 | T339E Q343E 1445A |
| | | | (UniProt: | |
| | | | A6P6V9) | |
| 924977 | 1209 | 953 | SEQ ID NO: 13 | K50N T339E Q343E L344M |
| | | | (UniProt: | |
| | | | A6P6V9) | |

TABLE 20
Sequences of Terminal Synthases described in Example 1

| | N-terminal | N-terminal | C-terminal | C-terminal | Complete | Complete |
|---|---|---|---|---|---|---|
| Strain | signal peptide | signal peptide | signal peptide | signal peptide | Fusion | Fusion |
| ID | (nucleotide) | (amino acid) | (nucleotide) | (amino acid) | (nucleotide) | (amino acid) |
| 631188 | n/a | n/a | (SEQ ID | (SEQ ID | (SEQ ID | (SEQ ID |
| | | | NO: 19) | NO: 17) | NO: 687) | NO: 686) |
| 631189 | (SEQ ID | (SEQ ID | n/a | n/a | (SEQ ID | (SEQ ID |
| | NO: 695) | NO: 694) | | | NO: 689) | NO: 688) |
| 631190 | (SEQ ID | (SEQ ID | (SEQ ID | (SEQ ID | (SEQ ID | (SEQ ID |
| | NO: 18) | NO: 16) | NO: 19) | NO: 17) | NO: 691) | NO: 690) |
| 631191 | (SEQ ID | (SEQ ID | (SEQ ID | (SEQ ID | (SEQ ID | (SEQ ID |
| | NO: 609) | NO: 608) | NO: 607) | NO: 17) | NO: 639) | NO: 638) |
| 631192 | (SEQ ID | (SEQ ID | (SEQ ID | (SEQ ID | (SEQ ID | (SEQ ID |
| | NO: 609) | NO: 608) | NO: 631) | NO: 630) | NO: 641) | NO: 640) |
| 631193 | (SEQ ID | (SEQ ID | (SEQ ID | (SEQ ID | (SEQ ID | (SEQ ID |
| | NO: 35) | NO: 16) | NO: 607) | NO: 17) | NO: 32) | NO: 23) |
| 631194 | (SEQ ID | (SEQ ID | (SEQ ID | (SEQ ID | (SEQ ID | (SEQ ID |
| | NO: 35) | NO: 16) | NO: 631) | NO: 630) | NO: 643) | NO: 642) |
| 631195 | (SEQ ID | (SEQ ID | (SEQ ID | (SEQ ID | (SEQ ID | (SEQ ID |
| | NO: 611) | NO: 610) | NO: 607) | NO: 17) | NO: 645) | NO: 644) |
| 631196 | (SEQ ID | (SEQ ID | (SEQ ID | (SEQ ID | (SEQ ID | (SEQ ID |
| | NO: 611) | NO: 610) | NO: 631) | NO: 630) | NO: 647) | NO: 646) |
| 631197 | (SEQ ID | (SEQ ID | (SEQ ID | (SEQ ID | (SEQ ID | (SEQ ID |
| | NO: 613) | NO: 612) | NO: 607) | NO: 17) | NO: 649) | NO: 648) |
| 631198 | (SEQ ID | (SEQ ID | (SEQ ID | (SEQ ID | (SEQ ID | (SEQ ID |
| | NO: 613) | NO: 612) | NO: 631) | NO: 630) | NO: 651) | NO: 650) |
| 631199 | (SEQ ID | (SEQ ID | (SEQ ID | (SEQ ID | (SEQ ID | (SEQ ID |
| | NO: 615) | NO: 614) | NO: 607) | NO: 17) | NO: 653) | NO: 652) |
| 631200 | (SEQ ID | (SEQ ID | (SEQ ID | (SEQ ID | (SEQ ID | (SEQ ID |
| | NO: 615) | NO: 614) | NO: 631) | NO: 630) | NO: 655) | NO: 654) |
| 631201 | n/a | n/a | (SEQ ID | (SEQ ID | (SEQ ID | (SEQ ID |
| | | | NO: 633) | NO: 632) | NO: 657) | NO: 656) |
| 631202 | n/a | n/a | (SEQ ID | (SEQ ID | (SEQ ID | (SEQ ID |
| | | | NO: 635) | NO: 634) | NO: 659) | NO: 658) |
| 631203 | n/a | n/a | (SEQ ID | (SEQ ID | (SEQ ID | (SEQ ID |
| | | | NO: 637) | NO: 636) | NO: 661) | NO: 660) |
| 631204 | (SEQ ID | (SEQ ID | n/a | n/a | (SEQ ID | (SEQ ID |
| | NO: 617) | NO: 616) | | | NO: 663) | NO: 662) |
| 631205 | (SEQ ID | (SEQ ID | n/a | n/a | (SEQ ID | (SEQ ID |
| | NO: 619) | NO: 618) | | | NO: 665) | NO: 664) |
| 631206 | (SEQ ID | (SEQ ID | n/a | n/a | (SEQ ID | (SEQ ID |
| | NO: 609) | NO: 608) | | | NO: 667) | NO: 666) |
| 631207 | (SEQ ID | (SEQ ID | n/a | n/a | (SEQ ID | (SEQ ID |
| | NO: 35) | NO: 16) | | | NO: 669) | NO: 668) |
| 631208 | (SEQ ID | (SEQ ID | n/a | n/a | (SEQ ID | (SEQ ID |
| | NO: 615) | NO: 614) | | | NO: 671) | NO: 670) |
| 631209 | (SEQ ID | (SEQ ID | n/a | n/a | (SEQ ID | (SEQ ID |
| | NO: 613) | NO: 612) | | | NO: 673) | NO: 672) |
| 631210 | (SEQ ID | (SEQ ID | n/a | n/a | (SEQ ID | (SEQ ID |
| | NO: 621) | NO: 620) | | | NO: 675) | NO: 674) |
| 631211 | (SEQ ID | (SEQ ID | n/a | n/a | (SEQ ID | (SEQ ID |
| | NO: 623) | NO: 622) | | | NO: 677) | NO: 676) |
| 631212 | (SEQ ID | (SEQ ID | n/a | n/a | (SEQ ID | (SEQ ID |
| | NO: 611) | NO: 610) | | | NO: 679) | NO: 678) |
| 631213 | (SEQ ID | (SEQ ID | n/a | n/a | (SEQ ID | (SEQ ID |
| | NO: 625) | NO: 624) | | | NO: 681) | NO: 680) |
| 631214 | (SEQ ID | (SEQ ID | n/a | n/a | (SEQ ID | (SEQ ID |
| | NO: 627) | NO: 626) | | | NO: 683) | NO: 682) |
| 631215 | (SEQ ID | (SEQ ID | n/a | n/a | (SEQ ID | (SEQ ID |
| | NO: 629) | NO: 628) | | | NO: 685) | NO: 684) |
| 631216 | (SEQ ID | (SEQ ID | n/a | n/a | (SEQ ID | (SEQ ID |
| | NO: 18) | NO: 16) | | | NO: 693) | NO: 692) |

TABLE 21
Sequences of Terminal Synthases described in Example 2*

| Strain | Nucleotide | Amino Acid |
|---|---|---|
| ID | SEQ ID NO: | SEQ ID NO: |
| 752452 | 27 | 36 |
| 752426 | 28 | 37 |
| 752445 | 29 | 38 |
| 752436 | 30 | 39 |
| 752430 | 31 | 40 |
| 752456 | 33 | 42 |
| 752427 | 34 | 43 |

*For the library screen, the terminal synthase sequences were expressed with an N-terminal MFalpha2 signal peptide (SEQ ID NO: 16) and a C-terminal HDEL signal peptide (SEQ ID NO: 17). A methionine residue was also added at the amino terminus of SEQ ID NO: 16.

TABLE 22
Sequences of Terminal Synthases described in Example 3*

| Strain | Nucleotide | Amino Acid |
|---|---|---|
| ID | SEQ ID NO: | SEQ ID NO: |
| 616314 | 45 | 136 |
| 701909 | 46 | 137 |
| 701916 | 47 | 138 |
| 701917 | 48 | 139 |
| 701919 | 49 | 140 |
| 701934 | 50 | 141 |
| 701940 | 51 | 142 |
| 701964 | 52 | 143 |
| 701992 | 53 | 144 |
| 701998 | 54 | 145 |
| 702004 | 55 | 146 |
| 702008 | 56 | 147 |
| 702022 | 57 | 148 |
| 702056 | 58 | 149 |
| 702080 | 59 | 150 |
| 702105 | 60 | 151 |
| 702109 | 61 | 152 |
| 702115 | 62 | 153 |
| 702118 | 63 | 154 |
| 702123 | 64 | 155 |
| 702136 | 65 | 156 |
| 702147 | 66 | 157 |
| 702150 | 67 | 158 |
| 702155 | 68 | 159 |
| 702187 | 69 | 160 |
| 702201 | 70 | 161 |
| 702215 | 71 | 162 |
| 702257 | 72 | 163 |
| 702258 | 73 | 164 |
| 702261 | 74 | 165 |
| 702276 | 75 | 166 |
| 702278 | 76 | 167 |
| 702280 | 77 | 168 |
| 702288 | 78 | 169 |
| 702297 | 79 | 170 |
| 702304 | 80 | 171 |
| 702308 | 81 | 172 |
| 702315 | 82 | 173 |
| 702329 | 83 | 174 |
| 702338 | 84 | 175 |
| 702342 | 85 | 176 |
| 702346 | 86 | 177 |
| 702350 | 87 | 178 |
| 702370 | 88 | 179 |
| 702376 | 89 | 180 |
| 702396 | 90 | 181 |
| 702412 | 91 | 182 |
| 702462 | 92 | 183 |
| 702470 | 93 | 184 |
| 702485 | 94 | 185 |
| 702507 | 95 | 186 |
| 702513 | 96 | 187 |
| 702517 | 97 | 188 |
| 702531 | 98 | 189 |
| 702563 | 99 | 190 |
| 702571 | 100 | 191 |
| 702581 | 101 | 192 |
| 702585 | 102 | 193 |
| 702591 | 103 | 194 |
| 702595 | 104 | 195 |
| 702601 | 105 | 196 |
| 702603 | 106 | 197 |
| 702660 | 107 | 198 |
| 702688 | 108 | 199 |
| 702891 | 109 | 200 |
| 702948 | 110 | 201 |
| 703131 | 111 | 202 |
| 703178 | 112 | 203 |
| 703300 | 113 | 204 |
| 703306 | 114 | 205 |
| 703341 | 115 | 206 |
| 703452 | 116 | 207 |
| 703455 | 117 | 208 |
| 703459 | 118 | 209 |
| 703473 | 119 | 210 |
| 703482 | 120 | 211 |
| 703520 | 121 | 212 |
| 703524 | 122 | 213 |
| 703528 | 123 | 214 |
| 703584 | 124 | 215 |
| 703607 | 125 | 216 |
| 703611 | 126 | 217 |
| 703634 | 127 | 218 |
| 703638 | 128 | 219 |
| 703685 | 129 | 220 |
| 703699 | 130 | 221 |
| 703703 | 131 | 222 |
| 703707 | 132 | 223 |
| 703721 | 133 | 224 |
| 703738 | 134 | 225 |
| 616315 | 22 | 21 |
| 701870 | 254 | 284 |
| 701939 | 255 | 285 |
| 701954 | 256 | 286 |
| 701963 | 257 | 287 |
| 701977 | 258 | 288 |
| 701990 | 259 | 289 |
| 701996 | 260 | 290 |
| 702000 | 261 | 291 |
| 702043 | 262 | 292 |
| 702050 | 263 | 293 |
| 702054 | 264 | 294 |
| 702090 | 265 | 295 |
| 702154 | 266 | 296 |
| 702232 | 267 | 297 |
| 702240 | 268 | 298 |
| 702761 | 269 | 299 |
| 702767 | 270 | 300 |
| 702801 | 271 | 301 |
| 702894 | 272 | 302 |
| 702927 | 273 | 303 |
| 702942 | 274 | 304 |
| 702993 | 275 | 305 |
| 703174 | 276 | 306 |
| 703239 | 277 | 307 |
| 703256 | 278 | 308 |
| 703289 | 279 | 309 |
| 703637 | 280 | 310 |
| 703690 | 281 | 311 |
| 703722 | 282 | 312 |
| 703725 | 283 | 313 |

*For the library screen, the terminal synthase sequences were expressed with an N-terminal MFalpha2 signal peptide (SEQ ID NO: 16) and a C-terminal HDEL signal peptide (SEQ ID NO: 17). A methionine residue was also added at the amino terminus of SEQ ID NO: 16.

TABLE 23
Sequences of Terminal Synthases described in Example 4*

| Strain | Nucleotide SEQ | Amino Acid SEQ |
|---|---|---|
| ID | ID NO: | ID NO: |
| t825123 | 322 | 464 |
| t825215 | 323 | 465 |
| t825585 | 324 | 466 |
| t826070 | 325 | 467 |
| t826072 | 326 | 468 |
| t826076 | 327 | 469 |
| t826096 | 328 | 470 |
| t825125 | 329 | 471 |
| t825189 | 330 | 472 |
| t825217 | 331 | 473 |
| t825219 | 332 | 474 |
| t825377 | 333 | 475 |
| t826030 | 334 | 476 |
| t826036 | 335 | 477 |
| t824622 | 336 | 478 |
| t825119 | 337 | 479 |
| t825129 | 338 | 480 |
| t825151 | 339 | 481 |
| t825213 | 340 | 482 |
| t825221 | 341 | 483 |
| t825379 | 342 | 484 |
| t826054 | 343 | 485 |
| t826100 | 344 | 486 |
| t826132 | 345 | 487 |
| t824932 | 346 | 488 |
| t825910 | 347 | 489 |
| t825025 | 348 | 490 |
| t825621 | 349 | 491 |
| t824996 | 350 | 492 |
| t824498 | 351 | 493 |
| t825269 | 352 | 494 |
| t825259 | 353 | 495 |
| t825978 | 354 | 496 |
| t825043 | 355 | 497 |
| t825528 | 356 | 498 |
| t824930 | 357 | 499 |
| t825077 | 358 | 500 |
| t825023 | 359 | 501 |
| t825103 | 360 | 502 |
| t824618 | 361 | 503 |
| t825071 | 362 | 504 |
| t825059 | 363 | 505 |
| t825126 | 364 | 506 |
| t825766 | 365 | 507 |
| t825987 | 366 | 508 |
| t826274 | 367 | 509 |
| t825341 | 368 | 510 |
| t826093 | 369 | 511 |
| t825841 | 370 | 512 |
| t824918 | 371 | 513 |
| t825034 | 372 | 514 |
| t825593 | 373 | 515 |
| t825277 | 374 | 516 |
| t825833 | 375 | 517 |
| t825936 | 376 | 518 |
| t825933 | 377 | 519 |
| t824603 | 378 | 520 |
| t824539 | 379 | 521 |
| t824659 | 380 | 522 |
| t824773 | 381 | 523 |
| t825907 | 382 | 524 |
| t825930 | 383 | 525 |
| t826097 | 384 | 526 |
| t825889 | 385 | 527 |
| t824654 | 386 | 528 |
| t824571 | 387 | 529 |
| t825248 | 388 | 530 |
| t824807 | 389 | 531 |
| t825877 | 390 | 532 |
| t826099 | 391 | 533 |
| t824746 | 392 | 534 |
| t824612 | 393 | 535 |
| t824626 | 394 | 536 |
| t825154 | 395 | 537 |
| t824540 | 396 | 538 |
| t824786 | 397 | 539 |
| t824688 | 398 | 540 |
| t825012 | 399 | 541 |
| t824646 | 400 | 542 |
| t825862 | 401 | 543 |
| t824653 | 402 | 544 |
| t824625 | 403 | 545 |
| t824942 | 404 | 546 |
| t825773 | 405 | 547 |
| t825108 | 406 | 548 |
| t825301 | 407 | 549 |
| t825935 | 408 | 550 |
| t825739 | 409 | 551 |
| t825724 | 410 | 552 |
| t824845 | 411 | 553 |
| t825099 | 412 | 554 |
| t825297 | 413 | 555 |
| t824990 | 414 | 556 |
| t824771 | 415 | 557 |
| t825263 | 416 | 558 |
| t825286 | 417 | 559 |
| t826279 | 418 | 560 |
| t825273 | 419 | 561 |
| t825101 | 420 | 562 |
| t825049 | 421 | 563 |
| t826280 | 422 | 564 |
| t824928 | 423 | 565 |
| t824526 | 424 | 566 |
| t826284 | 425 | 567 |
| t825914 | 426 | 568 |
| t824903 | 427 | 569 |
| t825013 | 428 | 570 |
| t826208 | 429 | 571 |
| t826237 | 430 | 572 |
| t825309 | 431 | 573 |
| t825708 | 432 | 574 |
| t825501 | 433 | 575 |
| t825085 | 434 | 576 |
| t825057 | 435 | 577 |
| t825496 | 436 | 578 |
| t824647 | 437 | 579 |
| t826137 | 438 | 580 |
| t826278 | 439 | 581 |
| t825141 | 440 | 582 |
| t825009 | 441 | 583 |
| t825086 | 442 | 584 |
| t825075 | 443 | 585 |
| t825725 | 444 | 586 |
| t825090 | 445 | 587 |
| t824861 | 446 | 588 |
| t825007 | 447 | 589 |
| t825084 | 448 | 590 |
| t825029 | 449 | 591 |
| t825015 | 450 | 592 |
| t825031 | 451 | 593 |
| t825047 | 452 | 594 |
| t825633 | 453 | 595 |
| t825092 | 454 | 596 |
| t825105 | 455 | 597 |
| t825625 | 456 | 598 |
| t824663 | 457 | 599 |
| t824937 | 458 | 600 |
| t825087 | 459 | 601 |
| t825078 | 460 | 602 |
| t825058 | 461 | 603 |
| t825024 | 462 | 604 |
| t825109 | 463 | 605 |
| t807949 | 22 | 21 |
| t807973 | 45 | 136 |
| t820182 | 254 | 284 |

*For the library screen, the terminal synthase sequences were expressed with an N-terminal MFalpha2 signal peptide (SEQ ID NO: 16) and a C-terminal HDEL signal peptide (SEQ ID NO: 17). A methionine residue was also added at the amino terminus of SEQ ID NO: 16.

TABLE 24
Sequences of Terminal Synthases described in Example 5*

| Strain | Nucleotide | Amino Acid |
|---|---|---|
| ID | SEQ ID NO: | SEQ ID NO: |
| 876606 | 22 | 21 |
| 876607 | 45 | 136 |
| 865859 | 403 | 545 |
| 865977 | 418 | 560 |
| 923976 | 954 | 698 |
| 923759 | 955 | 699 |
| 923624 | 956 | 700 |
| 923980 | 957 | 701 |
| 923922 | 958 | 702 |
| 923890 | 959 | 703 |
| 923616 | 960 | 704 |
| 923954 | 961 | 705 |
| 923894 | 962 | 706 |
| 923972 | 963 | 707 |
| 923680 | 964 | 708 |
| 923918 | 965 | 709 |
| 924465 | 966 | 710 |
| 924725 | 967 | 711 |
| 924927 | 968 | 712 |
| 923908 | 969 | 713 |
| 923613 | 970 | 714 |
| 924717 | 971 | 715 |
| 924309 | 972 | 716 |
| 923795 | 973 | 717 |
| 923880 | 974 | 718 |
| 924364 | 975 | 719 |
| 924612 | 976 | 720 |
| 924164 | 977 | 721 |
| 924803 | 978 | 722 |
| 924559 | 979 | 723 |
| 924468 | 980 | 724 |
| 923884 | 981 | 725 |
| 924276 | 982 | 726 |
| 924665 | 983 | 727 |
| 924691 | 984 | 728 |
| 924639 | 985 | 729 |
| 924512 | 986 | 730 |
| 924723 | 987 | 731 |
| 923916 | 988 | 732 |
| 924428 | 989 | 733 |
| 924472 | 990 | 734 |
| 924609 | 991 | 735 |
| 924657 | 992 | 736 |
| 924226 | 993 | 737 |
| 924306 | 994 | 738 |
| 924695 | 995 | 739 |
| 924162 | 996 | 740 |
| 924387 | 997 | 741 |
| 924667 | 998 | 742 |
| 924425 | 999 | 743 |
| 924373 | 1000 | 744 |
| 924212 | 1001 | 745 |
| 924635 | 1002 | 746 |
| 923912 | 1003 | 747 |
| 924304 | 1004 | 748 |
| 924028 | 1005 | 749 |
| 924426 | 1006 | 750 |
| 924160 | 1007 | 751 |
| 924424 | 1008 | 752 |
| 924431 | 1009 | 753 |
| 924518 | 1010 | 754 |
| 923771 | 1011 | 755 |
| 923744 | 1012 | 756 |
| 924673 | 1013 | 757 |
| 924398 | 1014 | 758 |
| 923948 | 1015 | 759 |
| 924062 | 1016 | 760 |
| 923854 | 1017 | 761 |
| 923866 | 1018 | 762 |
| 924645 | 1019 | 763 |
| 924649 | 1020 | 764 |
| 923862 | 1021 | 765 |
| 924699 | 1022 | 766 |
| 924417 | 1023 | 767 |
| 924158 | 1024 | 768 |
| 923840 | 1025 | 769 |
| 923758 | 1026 | 770 |
| 924719 | 1027 | 771 |
| 924006 | 1028 | 772 |
| 924412 | 1029 | 773 |
| 924030 | 1030 | 774 |
| 924094 | 1031 | 775 |
| 924484 | 1032 | 776 |
| 924715 | 1033 | 777 |
| 924576 | 1034 | 778 |
| 924332 | 1035 | 779 |
| 924298 | 1036 | 780 |
| 924083 | 1037 | 781 |
| 924847 | 1038 | 782 |
| 924322 | 1039 | 783 |
| 923811 | 1040 | 784 |
| 924707 | 1041 | 785 |
| 924928 | 1042 | 786 |
| 923848 | 1043 | 787 |
| 924266 | 1044 | 788 |
| 924661 | 1045 | 789 |
| 924744 | 1046 | 790 |
| 924748 | 1047 | 791 |
| 924828 | 1048 | 792 |
| 924492 | 1049 | 793 |
| 923695 | 1050 | 794 |
| 924932 | 1051 | 795 |
| 924446 | 1052 | 796 |
| 924348 | 1053 | 797 |
| 923786 | 1054 | 798 |
| 924942 | 1055 | 799 |
| 923960 | 1056 | 800 |
| 924284 | 1057 | 801 |
| 924502 | 1058 | 802 |
| 923727 | 1059 | 803 |
| 924413 | 1060 | 804 |
| 924406 | 1061 | 805 |
| 924843 | 1062 | 806 |
| 924965 | 1063 | 807 |
| 924864 | 1064 | 808 |
| 924940 | 1065 | 809 |
| 923653 | 1066 | 810 |
| 923780 | 1067 | 811 |
| 923850 | 1068 | 812 |
| 923957 | 1069 | 813 |
| 924836 | 1070 | 814 |
| 924642 | 1071 | 815 |
| 924888 | 1072 | 816 |
| 923910 | 1073 | 817 |
| 924618 | 1074 | 818 |
| 923896 | 1075 | 819 |
| 924760 | 1076 | 820 |
| 923899 | 1077 | 821 |
| 924436 | 1078 | 822 |
| 924890 | 1079 | 823 |
| 924240 | 1080 | 824 |
| 924108 | 1081 | 825 |
| 924586 | 1082 | 826 |
| 924114 | 1083 | 827 |
| 924051 | 1084 | 828 |
| 924765 | 1085 | 829 |
| 924801 | 1086 | 830 |
| 924264 | 1087 | 831 |
| 923611 | 1088 | 832 |
| 924640 | 1089 | 833 |
| 924747 | 1090 | 834 |
| 924912 | 1091 | 835 |
| 924767 | 1092 | 836 |
| 924524 | 1093 | 837 |
| 924381 | 1094 | 838 |
| 924946 | 1095 | 839 |
| 924945 | 1096 | 840 |
| 924764 | 1097 | 841 |
| 924378 | 1098 | 842 |
| 865957 | 1099 | 843 |
| 924716 | 1100 | 844 |
| 924528 | 1101 | 845 |
| 923805 | 1102 | 846 |
| 924856 | 1103 | 847 |
| 923765 | 1104 | 848 |
| 924112 | 1105 | 849 |
| 924253 | 1106 | 850 |
| 924246 | 1107 | 851 |
| 923672 | 1108 | 852 |
| 924957 | 1109 | 853 |
| 924497 | 1110 | 854 |
| 923818 | 1111 | 855 |
| 923807 | 1112 | 856 |
| 924909 | 1113 | 857 |
| 923942 | 1114 | 858 |
| 924745 | 1115 | 859 |
| 924131 | 1116 | 860 |
| 924110 | 1117 | 861 |
| 924227 | 1118 | 862 |
| 924978 | 1119 | 863 |
| 923657 | 1120 | 864 |
| 924139 | 1121 | 865 |
| 924688 | 1122 | 866 |
| 924400 | 1123 | 867 |
| 923726 | 1124 | 868 |
| 924898 | 1125 | 869 |
| 923697 | 1126 | 870 |
| 924969 | 1127 | 871 |
| 923723 | 1128 | 872 |
| 924167 | 1129 | 873 |
| 924660 | 1130 | 874 |
| 923675 | 1131 | 875 |
| 924766 | 1132 | 876 |
| 924261 | 1133 | 877 |
| 924962 | 1134 | 878 |
| 924743 | 1135 | 879 |
| 924900 | 1136 | 880 |
| 924384 | 1137 | 881 |
| 924622 | 1138 | 882 |
| 924604 | 1139 | 883 |
| 924433 | 1140 | 884 |
| 924487 | 1141 | 885 |
| 924548 | 1142 | 886 |
| 924829 | 1143 | 887 |
| 924835 | 1144 | 888 |
| 924851 | 1145 | 889 |
| 924555 | 1146 | 890 |
| 923609 | 1147 | 891 |
| 924552 | 1148 | 892 |
| 924683 | 1149 | 893 |
| 924455 | 1150 | 894 |
| 924587 | 1151 | 895 |
| 924580 | 1152 | 896 |
| 924811 | 1153 | 897 |
| 924855 | 1154 | 898 |
| 924218 | 1155 | 899 |
| 924214 | 1156 | 900 |
| 924459 | 1157 | 901 |
| 924520 | 1158 | 902 |
| 924346 | 1159 | 903 |
| 923784 | 1160 | 904 |
| 924681 | 1161 | 905 |
| 924585 | 1162 | 906 |
| 924522 | 1163 | 907 |
| 924262 | 1164 | 908 |
| 924693 | 1165 | 909 |
| 924686 | 1166 | 910 |
| 924583 | 1167 | 911 |
| 924595 | 1168 | 912 |
| 924867 | 1169 | 913 |
| 924407 | 1170 | 914 |
| 924352 | 1171 | 915 |
| 923928 | 1172 | 916 |
| 923647 | 1173 | 917 |
| 924808 | 1174 | 918 |
| 924500 | 1175 | 919 |
| 923917 | 1176 | 920 |
| 923694 | 1177 | 921 |
| 923924 | 1178 | 922 |
| 923610 | 1179 | 923 |
| 923851 | 1180 | 924 |
| 923679 | 1181 | 925 |
| 923806 | 1182 | 926 |
| 923603 | 1183 | 927 |
| 923870 | 1184 | 928 |
| 923836 | 1185 | 929 |
| 923935 | 1186 | 930 |
| 923946 | 1187 | 931 |
| 923617 | 1188 | 932 |
| 924979 | 1189 | 933 |
| 924920 | 1190 | 934 |
| 924960 | 1191 | 935 |
| 924684 | 1192 | 936 |
| 924908 | 1193 | 937 |
| 924652 | 1194 | 938 |
| 924778 | 1195 | 939 |
| 924800 | 1196 | 940 |
| 923978 | 1197 | 941 |
| 924812 | 1198 | 942 |
| 923953 | 1199 | 943 |
| 923955 | 1200 | 944 |
| 923974 | 1201 | 945 |
| 924746 | 1202 | 946 |
| 924910 | 1203 | 947 |
| 924922 | 1204 | 948 |
| 924929 | 1205 | 949 |
| 924961 | 1206 | 950 |
| 924972 | 1207 | 951 |
| 924973 | 1208 | 952 |
| 924977 | 1209 | 953 |

*For the library screen, the terminal synthase sequences were expressed with an N-terminal MFalpha2 signal peptide (SEQ ID NO: 16) and a C-terminal HDEL signal peptide (SEQ ID NO: 17). A methionine residue was also added at the amino terminus of SEQ ID NO: 16.

TABLE 25
Additional Terminal Synthase Sequences

| | | N-terminal | C-terminal | Complete |
|---|---|---|---|---|
| Strain | TS (amino | signal peptide | signal peptide | Fusion |
| ID | acid) | (amino acid) | (amino acid) | (amino acid) |
| 703738 | (SEQ ID | (SEQ ID NO: 16) | (SEQ ID NO: 17) | (SEQ ID |
| | NO: 225) | | | NO: 1210) |
| 702376 | (SEQ ID | (SEQ ID NO: 16) | (SEQ ID NO: 17) | (SEQ ID |
| | NO: 180) | | | NO: 1211) |
| 702350 | (SEQ ID | (SEQ ID NO: 16) | (SEQ ID NO: 17) | (SEQ ID |
| | NO: 178) | | | NO: 1212) |
| 702601 | (SEQ ID | (SEQ ID NO: 16) | (SEQ ID NO: 17) | (SEQ ID |
| | NO: 196) | | | NO: 1213) |
| 702660 | (SEQ ID | (SEQ ID NO: 16) | (SEQ ID NO: 17) | (SEQ ID |
| | NO: 198) | | | NO: 251) |
| 702258 | (SEQ ID | (SEQ ID NO: 16) | (SEQ ID NO: 17) | (SEQ ID |
| | NO: 164) | | | NO: 1214) |

TABLE 26
Additional Terminal Synthase Sequences

| Strain | | TS with signal peptides |
|---|---|---|
| ID | TS (nucleotide) | (nucleotide) |
| 703738 | (SEQ ID NO: 134) | (SEQ ID NO: 1215) |
| 702376 | (SEQ ID NO: 89) | (SEQ ID NO: 1216) |
| 702350 | (SEQ ID NO: 87) | (SEQ ID NO: 1217) |
| 702601 | (SEQ ID NO: 105) | (SEQ ID NO: 1218) |
| 702660 | (SEQ ID NO: 107) | (SEQ ID NO: 244) |
| 702258 | (SEQ ID NO: 73) | (SEQ ID NO: 1219) |

[0607] It should be appreciated that sequences disclosed in this application may or may not contain signal sequences. The sequences disclosed in this application encompass versions with or without signal sequences. It should also be understood that protein sequences disclosed in this application may be depicted with or without a start codon (M). The sequences disclosed in this application encompass versions with or without start codons. Accordingly, in some instances amino acid numbering may correspond to protein sequences containing a start codon, while in other instances, amino acid numbering may correspond to protein sequences that do not contain a start codon. It should also be understood that sequences disclosed in this application may be depicted with or without a stop codon. The sequences disclosed in this application encompass versions with or without stop codons. Aspects of the disclosure encompass host cells comprising any of the sequences described in this application and fragments thereof.

### EQUIVALENTS

[0608] Those skilled in the art will recognize, or be able to ascertain using no more than routine experimentation, many equivalents to the specific embodiments of the invention described here. Such equivalents are intended to be encompassed by the following claims.

[0609] All references, including patent documents, are incorporated by reference in their entirety.

The application's sequence listing, which the Patent Office published only in electronic form, follows.

SEQUENCE LISTING (1220 sequences)

SEQ ID NO: 1 - protein, 101 aa, Cannabis sativa
MAVKHLIVLKFKDEITEAQKEEFFKTYVNLVNIIPAMKDVYWGKDVTQKNKEEGYTHIVEVTFESVETIQDYIIHPAHVGFGDVYRSFWEKLLIFDYTPRK

SEQ ID NO: 2 - DNA, 303 bp, Artificial Sequence
  Synthetic
atggcagtgaagcatttgattgtattgaagttcaaagatgaaatcacagaagcccaaaaggaagaatttttcaagacgtatgtgaatcttgtgaatatcatcccagccatgaaagatgtatactggggtaaagatgtgactcaaaagaataaggaagaagggtacactcacatagttgaggtaacatttgagagtgtggagactattcaggactacattattcatcctgcccatgttggatttggagatgtctatcgttctttctgggaaaaacttctcatttttgactacacaccacgaaag

SEQ ID NO: 3 - DNA, 78 bp, Cannabis sativa
aattgctcagcattttccttttggtttgtttgcaaaataatatttttctttctctcattcaatatccaaatttcaata

SEQ ID NO: 4 - protein, 27 aa, Cannabis sativa
NCSAFSFWFVCKIIFFFLSFNIQISIA

SEQ ID NO: 5 - protein, 719 aa, Cannabis sativa
MGKNYKSLDSVVASDFIALGITSEVAETLHGRLAEIVCNYGAATPQTWINIANHILSPDLPFSLHQMLFYGCYKDFGPAPPAWIPDPEKVKSTNLGALLEKRGKEFLGVKYKDPISSFSHFQEFSVRNPEVYWRTVLMDEMKISFSKDPECILRRDDINNPGGSEWLPGGYLNSAKNCLNVNSNKKLNDTMIVWRDEGNDDLPLNKLTLDQLRKRVWLVGYALEEMGLEKGCAIAIDMPMHVDAVVIYLAIVLAGYVVVSIADSFSAPEISTRLRLSKAKAIFTQDHIIRGKKRIPLYSRVVEAKSPMAIVIPCSGSNIGAELRDGDISWDYFLERAKEFKNCEFTAREQPVDAYTNILFSSGTTGEPKAIPWTQATPLKAAADGWSHLDIRKGDVIVWPTNLGWMMGPWLVYASLLNGASIALYNGSPLVSGFAKFVQDAKVTMLGVVPSIVRSWKSTNCVSGYDWSTIRCFSSSGEASNVDEYLWLMGRANYKPVIEMCGGTEIGGAFSAGSFLQAQSLSSFSSQCMGCTLYILDKNGYPMPKNKPGIGELALGPVMFGASKTLLNGNHHDVYFKGMPTLNGEVLRRHGDIFELTSNGYYHAHGRADDTMNIGGIKISSIEIERVCNEVDDRVFETTAIGVPPLGGGPEQLVIFFVLKDSNDTTIDLNQLRLSFNLGLQKKLNPLFKVTRVVPLSSLPRTATNKIMRRVLRQFSHFE

SEQ ID NO: 6 - protein, 543 aa, Cannabis sativa
MEKSGYGRDGIYRSLRPPLHLPNNNNLSMVSFLFRNSSSYPQKPALIDSETNQILSFSHFKSTVIKVSHGFLNLGIKKNDVVLIYAPNSIHFPVCFLGIIASGAIATTSNPLYTVSELSKQVKDSNPKLIITVPQLLEKVKGFNLPTILIGPDSEQESSSDKVMTFNDLVNLGGSSGSEFPIVDDFKQSDTAALLYSSGTTGMSKGVVLTHKNFIASSLMVTMEQDLVGEMDNVFLCFLPMFHVFGLAIITYAQLQRGNTVISMARFDLEKMLKDVEKYKVTHLWVVPPVILALSKNSMVKKFNLSSIKYIGSGAAPLGKDLMEECSKVVPYGIVAQGYGMTETCGIVSMEDIRGGKRNSGSAGMLASGVEAQIVSVDTLKPLPPNQLGEIWVKGPNMMQGYFNNPQATKLTIDKKGWVHTGDLGYFDEDGHLYVVDRIKELIKYKGFQVAPAELEGLLVSHPEILDAVVIPFPDAEAGEVPVAYVVRSPNSSLTENDVKKFIAGQVASFKRLRKVTFINSVPKSASGKILRRELIQKVRSNM

SEQ ID NO: 7 - protein, 385 aa, Cannabis sativa
MNHLRAEGPASVLAIGTANPENILLQDEFPDYYFRVTKSEHMTQLKEKFRKICDKSMIRKRNCFLNEEHLKQNPRLVEHEMQTLDARQDMLVVEVPKLGKDACAKAIKEWGQPKSKITHLIFTSASTTDMPGADYHCAKLLGLSPSVKRVMMYQLGCYGGGTVLRIAKDIAENNKGARVLAVCCDIMACLFRGPSESDLELLVGQAIFGDGAAAVIVGAEPDESVGERPIFELVSTGQTILPNSEGTIGGHIREAGLIFDLHKDVPMLISNNIEKCLIEAFTPIGISDWNSIFWITHPGGKAILDKVEEKLHLKSDKFVDSRHVLSEHGNMSSSTVLFVMDELRKRSLEEGKSTTGDGFEWGVLFGFGPGLTVERVVVRSVPIKY

SEQ ID NO: 8 - protein, 307 aa, Unknown [sequence omitted]

SEQ ID NO: 9 - DNA, 924 bp, Artificial Sequence
  Synthetic
atgtcagaagccgcagatgtcgaaagagtttacgccgctatggaagaagccgccggtttgttaggtgttgcctgtgccagagataagatctacccattgttgtctacttttcaagatacattagttgaaggtggttcagttgttgttttctctatggcttcaggtagacattctacagaattggatttctctatctcagttccaacatcacatggtgatccatacgctactgttgttgaaaaaggtttatttccagcaacaggtcatccagttgatgatttgttggctgatactcaaaagcatttgccagtttctatgtttgcaattgatggtgaagttactggtggtttcaagaaaacttacgctttctttccaactgataacatgccaggtgttgcagaattatctgctattccatcaatgccaccagctgttgcagaaaatgcagaattatttgctagatacggtttggataaggttcaaatgacatctatggattacaagaaaagacaagttaatttgtacttttctgaattatcagcacaaactttggaagctgaatcagttttggcattagttagagaattgggtttacatgttccaaacgaattgggtttgaagttttgtaaaagatctttctcagtttatccaactttaaactgggaaacaggcaagatcgatagattatgtttcgcagttatctctaacgatccaacattggttccatcttcagatgaaggtgatatcgaaaagtttcataactacgctactaaagcaccatatgcttacgttggtgaaaagagaacattagtttatggtttgactttatcaccaaaggaagaatactacaagttgggtgcttactaccacattaccgacgtacaaagaggtttattgaaagcattcgatagtttagaagactaa

SEQ ID NO: 10 - protein, 395 aa, Cannabis sativa
MGLSSVCTFSFQTNYHTLLNPHNNNPKTSLLCYRHPKTPIKYSYNNFPSKHCSTKSFHLQNKCSESLSIAKNSIRAATTNQTEPPESDNHSVATKILNFGKACWKLQRPYTIIAFTSCACGLFGKELLHNTNLISWSLMFKAFFFLVAILCIASFTTTINQIYDLHIDRINKPDLPLASGEISVNTAWIMSIIVALFGLIITIKMKGGPLYIFGYCFGIFGGIVYSVPPFRWKQNPSTAFLLNFLAHIITNFTFYYASRAALGLPFELRPSFTFLLAFMKSMGSALALIKDASDVEGDTKFGISTLASKYGSRNLTLFCSGIVLLSYVAAILAGIIWPQAFNSNVMLLSHAILAFWLILQTRDFALTNYDPEAGRRFYEFMWKLYYAEYLVYVFI

SEQ ID NO: 11 - protein, 398 aa, Cannabis sativa
MGLSLVCTFSFQTNYHTLLNPHNKNPKNSLLSYQHPKTPIIKSSYDNFPSKYCLTKNFHLLGLNSHNRISSQSRSIRAGSDQIEGSPHHESDNSIATKILNFGHTCWKLQRPYVVKGMISIACGLFGRELFNNRHLFSWGLMWKAFFALVPILSFNFFAAIMNQIYDVDIDRINKPDLPLVSGEMSIETAWILSIIVALTGLIVTIKLKSAPLFVFIYIFGIFAGFAYSVPPIRWKQYPFTNFLITISSHVGLAFTSYSATTSALGLPFVWRPAFSFIIAFMTVMGMTIAFAKDISDIEGDAKYGVSTVATKLGARNMTFVVSGVLLLNYLVSISIGIIWPQVFKSNIMILSHAILAFCLIFQTRELALANYASAPSRQFFEFIWLLYYAEYFVYVFI

SEQ ID NO: 12 - protein, 323 aa, Cannabis sativa
MSAGSDQIEGSPHHESDNSIATKILNFGHTCWKLQRPYVVKGMISIACGLFGRELFNNRHLFSWGLMWKAFFALVPILSFNFFAAIMNQIYDVDIDRINKPDLPLVSGEMSIETAWILSIIVALTGLIVTIKLKSAPLFVFIYIFGIFAGFAYSVPPIRWKQYPFTNFLITISSHVGLAFTSYSATTSALGLPFVWRPAFSFIIAFMTVMGMTIAFAKDISDIEGDAKYGVSTVATKLGARNMTFVVSGVLLLNYLVSISIGIIWPQVFKSNIMILSHAILAFCLIFQTRELALANYASAPSRQFFEFIWLLYYAEYFVYVFI

SEQ ID NO: 13 - protein, 544 aa, Cannabis sativa
MKCSTFSFWFVCKIIFFFFSFNIQTSIANPRENFLKCFSQYIPNNATNLKLVYTQNNPLYMSVLNSTIHNLRFTSDTTPKPLVIVTPSHVSHIQGTILCSKKVGLQIRTRSGGHDSEGMSYISQVPFVIVDLRNMRSIKIDVHSQTAWVEAGATLGEVYYWVNEKNENLSLAAGYCPTVCAGGHFGGGGYGPLMRNYGLAADNIIDAHLVNVHGKVLDRKSMGEDLFWALRGGGAESFGIIVAWKIRLVAVPKSTMFSVKKIMEIHELVKLVNKWQNIAYKYDKDLLLMTHFITRNITDNQGKNKTAIHTYFSSVFLGGVDSLVDLMNKSFPELGIKKTDCRQLSWIDTIIFYSGVVNYDTDNFNKEILLDRSAGQNGAFKIKLDYVKKPIPESVFVQILEKLYEEDIGAGMYALYPYGGIMDEISESAIPFPHRAGILYELWYICSWEKQEDNEKHLNWIRNIYNFMTPYVSKNPRLAYLNYRDLDIGINDPKNPNNYTQARIWGEKYFGKNFDRLVKVKTLVDPNNFFRNEQSIPPLPRHRH

SEQ ID NO: 14 - protein, 545 aa, Cannabis sativa
MNCSAFSFWFVCKIIFFFLSFHIQISIANPRENFLKCFSKHIPNNVANPKLVYTQHDQLYMSILNSTIQNLRFISDTTPKPLVIVTPSNNSHIQATILCSKKVGLQIRTRSGGHDAEGMSYISQVPFVVVDLRNMHSIKIDVHSQTAWVEAGATLGEVYYWINEKNENLSFPGGYCPTVGVGGHFSGGGYGALMRNYGLAADNIIDAHLVNVDGKVLDRKSMGEDLFWAIRGGGGENFGIIAAWKIKLVAVPSKSTIFSVKKNMEIHGLVKLFNKWQNIAYKYDKDLVLMTHFITKNITDNHGKNKTTVHGYFSSIFHGGVDSLVDLMNKSFPELGIKKTDCKEFSWIDTTIFYSGVVNFNTANFKKEILLDRSAGKKTAFSIKLDYVKKPIPETAMVKILEKLYEEDVGAGMYVLYPYGGIMEEISESAIPFPHRAGIMYELWYTASWEKQEDNEKHINWVRSVYNFTTPYVSQNPRLAYLNYRDLDLGKTNHASPNNYTQARIWGEKYFGKNFNRLVKVKTKVDPNNFFRNEQSIPPLPPHHH

SEQ ID NO: 15 - protein, 545 aa, Cannabis sativa
MNCSTFSFWFVCKIIFFFLSFNIQISIANPQENFLKCFSEYIPNNPANPKFIYTQHDQLYMSVLNSTIQNLRFTSDTTPKPLVIVTPSNVSHIQASILCSKKVGLQIRTRSGGHDAEGLSYISQVPFAIVDLRNMHTVKVDIHSQTAWVEAGATLGEVYYWINEMNENFSFPGGYCPTVGVGGHFSGGGYGALMRNYGLAADNIIDAHLVNVDGKVLDRKSMGEDLFWAIRGGGGENFGIIAACKIKLVVVPSKATIFSVKKNMEIHGLVKLFNKWQNIAYKYDKDLMLTTHFRTRNITDNHGKNKTTVHGYFSSIFLGGVDSLVDLMNKSFPELGIKKTDCKELSWIDTTIFYSGVVNYNTANFKKEILLDRSAGKKTAFSIKLDYVKKLIPETAMVKILEKLYEEEVGVGMYVLYPYGGIMDEISESAIPFPHRAGIMYELWYTATWEKQEDNEKHINWVRSVYNFTTPYVSQNPRLAYLNYRDLDLGKTNPESPNNYTQARIWGEKYFGKNFNRLVKVKTKADPNNFFRNEQSIPPLPPRHH

SEQ ID NO: 16 - protein, 18 aa, Saccharomyces cerevisiae
KFISTFLTFILAAVSVTA

SEQ ID NO: 17 - protein, 4 aa, Saccharomyces cerevisiae
HDEL

SEQ ID NO: 18 - DNA, 54 bp, Saccharomyces cerevisiae
aagtttatcagtaccttcttgacctttatcttggccgctgtctccgtaaccgct

SEQ ID NO: 19 - DNA, 12 bp, Saccharomyces cerevisiae
catgatgaatta

SEQ ID NO: 20 - protein, 545 aa, Cannabis sativa
MNCSAFSFWFVCKIIFFFLSFNIQISIANPQENFLKCFSEYIPNNPANPKFIYTQHDQLYMSVLNSTIQNLRFTSDTTPKPLVIVTPSNVSHIQASILCSKKVGLQIRTRSGGHDAEGMSYISQVPFVVVDLRNMHSIKIDVHSQTAWVEAGATLGEVYYWINEKNENFSFPGGYCPTVGVGGHFSGGGYGALMRNYGLAADNIIDAHLVNVDGKVLDRKSMGEDLFWAIRGGGGENFGIIAAWKIKLVAVPSKSTIFSVKKNMEIHGLVKLFNKWQNIAYKYDKDLVLMTHFITKNITDNHGKNKTTVHGYFSSIFHGGVDSLVDLMNKSFPELGIKKTDCKEFSWIDTTIFYSGVVNFNTANFKKEILLDRSAGKKTAFSIKLDYVKKPIPETAMVKILEKLYEEDVGVGMYVLYPYGGIMEEISESAIPFPHRAGIMYELWYTASWEKQEDNEKHINWVRSVYNFTTPYVSQNPRLAYLNYRDLDLGKTNPESPNNYTQARIWGEKYFGKNFNRLVKVKTKADPNNFFRNEQSIPPLPPHHH

SEQ ID NO: 21 - protein, 517 aa, Cannabis sativa
NPQENFLKCFSEYIPNNPANPKFIYTQHDQLYMSVLNSTIQNLRFTSDTTPKPLVIVTPSNVSHIQASILCSKKVGLQIRTRSGGHDAEGMSYISQVPFVVVDLRNMHSIKIDVHSQTAWVEAGATLGEVYYWINEKNENFSFPGGYCPTVGVGGHFSGGGYGALMRNYGLAADNIIDAHLVNVDGKVLDRKSMGEDLFWAIRGGGGENFGIIAAWKIKLVAVPSKSTIFSVKKNMEIHGLVKLFNKWQNIAYKYDKDLVLMTHFITKNITDNHGKNKTTVHGYFSSIFHGGVDSLVDLMNKSFPELGIKKTDCKEFSWIDTTIFYSGVVNFNTANFKKEILLDRSAGKKTAFSIKLDYVKKPIPETAMVKILEKLYEEDVGVGMYVLYPYGGIMEEISESAIPFPHRAGIMYELWYTASWEKQEDNEKHINWVRSVYNFTTPYVSQNPRLAYLNYRDLDLGKTNPESPNNYTQARIWGEKYFGKNFNRLVKVKTKADPNNFFRNEQSIPPLPPHHH

SEQ ID NO: 22 - DNA, 1551 bp, Artificial Sequence
  Synthetic
aacccgcaagaaaactttctaaaatgcttttctgaatacattcctaacaaccctgccaacccgaagtttatctacacacaacacgatcaattgtatatgagcgtgttgaatagtacaatacagaacctgaggtttacatccgacacaacgccgaaaccgctagtgatcgtcacaccctccaacgtaagccacattcaggcaagcattttatgcagcaagaaagtcggactgcagataaggacgaggtccggaggacacgacgccgaagggatgagctatatctcccaggtaccttttgtggtggtagacttgagaaatatgcactctatcaagatagacgttcactcccaaaccgcttgggttgaggcgggagccacccttggtgaggtctactactggatcaacgaaaagaatgaaaattttagctttcctgggggatattgcccaactgtaggtgttggcggccacttctcaggaggcggttatggggccttgatgcgtaactacggacttgcggccgacaacattatagacgcacatctagtgaatgtagacggcaaagttttagacaggaagagcatgggtgaggatcttttttgggcaattagaggcggagggggagaaaattttggaattatcgctgcttggaaaattaagctagttgcggtaccgagcaaaagcactatattctctgtaaaaaagaacatggagatacatggtttggtgaagctttttaataagtggcaaaacatcgcgtacaagtacgacaaagatctggttctgatgacgcattttataacgaaaaatatcaccgacaaccacggaaaaaacaaaaccacagtacatggctacttctctagtatatttcatgggggagtcgattctctggttgatttaatgaacaaatcattcccagagttgggtataaagaagacagactgtaaggagttctcttggattgacacaactatattctattcaggcgtagtcaactttaacacggcgaatttcaaaaaagagatccttctggacagatccgcaggtaagaaaactgcgttctctatcaaattggactatgtgaagaagcctattcccgaaaccgcgatggtcaagatacttgagaaattatacgaggaagatgtgggagttggaatgtacgtactttatccctatggtgggataatggaagaaatcagcgagagcgccattccatttccccatcgtgccggcatcatgtacgagctgtggtatactgcgagttgggagaagcaagaagacaacgaaaagcacattaactgggtcagatcagtttacaatttcaccaccccatacgtgtcccagaatccgcgtctggcttacttgaactaccgtgatcttgacctgggtaaaacgaacccggagtcacccaacaattacactcaagctagaatctggggagagaaatactttgggaagaacttcaacaggttagtaaaggttaaaaccaaggcagatccaaacaacttttttagaaatgaacaatccattcccccgctacccccgcaccatcac

SEQ ID NO: 23 - protein, 540 aa, Artificial Sequence
  Synthetic
MKFISTFLTFILAAVSVTANPQENFLKCFSEYIPNNPANPKFIYTQHDQLYMSVLNSTIQNLRFTSDTTPKPLVIVTPSNVSHIQASILCSKKVGLQIRTRSGGHDAEGMSYISQVPFVVVDLRNMHSIKIDVHSQTAWVEAGATLGEVYYWINEKNENFSFPGGYCPTVGVGGHFSGGGYGALMRNYGLAADNIIDAHLVNVDGKVLDRKSMGEDLFWAIRGGGGENFGIIAAWKIKLVAVPSKSTIFSVKKNMEIHGLVKLFNKWQNIAYKYDKDLVLMTHFITKNITDNHGKNKTTVHGYFSSIFHGGVDSLVDLMNKSFPELGIKKTDCKEFSWIDTTIFYSGVVNFNTANFKKEILLDRSAGKKTAFSIKLDYVKKPIPETAMVKILEKLYEEDVGVGMYVLYPYGGIMEEISESAIPFPHRAGIMYELWYTASWEKQEDNEKHINWVRSVYNFTTPYVSQNPRLAYLNYRDLDLGKTNPESPNNYTQARIWGEKYFGKNFNRLVKVKTKADPNNFFRNEQSIPPLPPHHHHDEL

SEQ ID NO: 24 - DNA, 1620 bp, Artificial Sequence
  Synthetic
atgaagtttatcagtaccttcttgacctttatcttggccgctgtctccgtaaccgctaacccgcaagaaaactttctaaaatgcttttctgaatacattcctaacaaccctgccaacccgaagtttatctacacacaacacgatcaattgtatatgagcgtgttgaatagtacaatacagaacctgaggtttacatccgacacaacgccgaaaccgctagtgatcgtcacaccctccaacgtaagccacattcaggcaagcattttatgcagcaagaaagtcggactgcagataaggacgaggtccggaggacacgacgccgaagggatgagctatatctcccaggtaccttttgtggtggtagacttgagaaatatgcactctatcaagatagacgttcactcccaaaccgcttgggttgaggcgggagccacccttggtgaggtctactactggatcaacgaaaagaatgaaaattttagctttcctgggggatattgcccaactgtaggtgttggcggccacttctcaggaggcggttatggggccttgatgcgtaactacggacttgcggccgacaacattatagacgcacatctagtgaatgtagacggcaaagttttagacaggaagagcatgggtgaggatcttttttgggcaattagaggcggagggggagaaaattttggaattatcgctgcttggaaaattaagctagttgcggtaccgagcaaaagcactatattctctgtaaaaaagaacatggagatacatggtttggtgaagctttttaataagtggcaaaacatcgcgtacaagtacgacaaagatctggttctgatgacgcattttataacgaaaaatatcaccgacaaccacggaaaaaacaaaaccacagtacatggctacttctctagtatatttcatgggggagtcgattctctggttgatttaatgaacaaatcattcccagagttgggtataaagaagacagactgtaaggagttctcttggattgacacaactatattctattcaggcgtagtcaactttaacacggcgaatttcaaaaaagagatccttctggacagatccgcaggtaagaaaactgcgttctctatcaaattggactatgtgaagaagcctattcccgaaaccgcgatggtcaagatacttgagaaattatacgaggaagatgtgggagttggaatgtacgtactttatccctatggtgggataatggaagaaatcagcgagagcgccattccatttccccatcgtgccggcatcatgtacgagctgtggtatactgcgagttgggagaagcaagaagacaacgaaaagcacattaactgggtcagatcagtttacaatttcaccaccccatacgtgtcccagaatccgcgtctggcttacttgaactaccgtgatcttgacctgggtaaaacgaacccggagtcacccaacaattacactcaagctagaatctggggagagaaatactttgggaagaacttcaacaggttagtaaaggttaaaaccaaggcagatccaaacaacttttttagaaatgaacaatccattcccccgctacccccgcaccatcaccatgatgaatta

SEQ ID NO: 25 - protein, 517 aa, Cannabis sativa
NPQENFLKCFSEYIPNNPANPKFIYTQHDQLYMSVLNSTIQNLRFTSDTTPKPLVIVTPSNVSHIQASILCSKKVGLQIRTRSGGHDAEGLSYISQVPFAIVDLRNMHTVKVDIHSQTAWVEAGATLGEVYYWINEMNENFSFPGGYCPTVGVGGHFSGGGYGALMRNYGLAADNIIDAHLVNVDGKVLDRKSMGEDLFWAIRGGGGENFGIIAACKIKLVVVPSKATIFSVKKNMEIHGLVKLFNKWQNIAYKYDKDLMLTTHFRTRNITDNHGKNKTTVHGYFSSIFLGGVDSLVDLMNKSFPELGIKKTDCKELSWIDTTIFYSGVVNYNTANFKKEILLDRSAGKKTAFSIKLDYVKKLIPETAMVKILEKLYEEEVGVGMYVLYPYGGIMDEISESAIPFPHRAGIMYELWYTATWEKQEDNEKHINWVRSVYNFTTPYVSQNPRLAYLNYRDLDLGKTNPESPNNYTQARIWGEKYFGKNFNRLVKVKTKADPNNFFRNEQSIPPLPPRHH

SEQ ID NO: 26 - skipped

SEQ ID NO: 27 - DNA, 1548 bp, Artificial Sequence
  Synthetic
aacccccaagaaaatttcctaaagtgtttctctgagtacatcccaaacaatccagctaaccctaagtttatatacacccaacacgaccaactgtacatgtccgtcctgaatagcacaatacaaaatttaagatttacttccgacacaacaccaaaaccattagtaatagttactccatctaacgtatcacacatacaagcttctatactatgcagtaaaaaagttggattacaaatcagaactagatcaggtggtcatgatagcgaaggtatgtcatacataagccaagtcccatttgttatcgtagatctgaggaacatgagaagtatcaaaatagacgttcattctcaaacagcttgggtagaagccggagcaacgctaggagaagtgtattactgggtaaatgaaaaaaacgaaaatttgtctttggctgccggctactgtccaacagtttgcgctggaggtcattttggtggcggtggttacggtcccttgatgagaaactatggtttagctgctgataatataattgacgctcaccttgtaaatgtgcatggaaaagtccttgacagaaagtccatgggtgaggatttgttttgggcattaagaggtggaggtgccgaatcttttggcattatagtggcatggaaaattagattagttgctgtacccaaaagtacaatgttctcggtaaaaaaaattatggaaattcatgaactagtgaagctagtgaataagtggcaaaatatagcatataaatacgacaaggatttgctactgatgacgcactttattaccagaaacattacggataatcaaggcaaaaataagacagcaattcatacctattttagctcagtcttcttaggcggggttgattccctggttgacctgatgaacaaaagtttcccggaactgggaataaaaaagaccgactgtagacaattatcttggatcgatacaattattttctatagtggtgtagtaaattatgataccgataattttaataaagaaatactactagatagaagcgctggtcaaaatggtgctttcaaaattaaacttgattatgtcaaaaaaccaatcccagaatcagtatttgttcaaattttggaaaagttatatgaagaggacattggggctgggatgtatgctttgtatccttacggtggcattatggatgaaatctctgagtctgccattccgtttccacatcgtgccggtattctatacgagctttggtatatttgctcctgggaaaaacaggaggataatgaaaaacatctgaattggataagaaatatttacaacttcatgacaccatatgtctcaaaaaacccgagacttgcttacctaaattacagggatttagacataggtattaacgatccaaagaatccaaataattatacacaagctcgtatttggggcgagaaatatttcggtaaaaattttgacaggctggtgaaggtaaagacactggtagaccccaataacttcttcagaaacgaacaatctatcccaccattgcctagacataggcat

SEQ ID NO: 28 - DNA, 1551 bp, Artificial Sequence
  Synthetic
aatcctagagaaaactttctgaaatgcttctctaaacacattcccaataatgttgctaatcctaaactggtatatacccaacacgatcaattgtacatgtctatcttgaacagcacgatacagaacttgagattcatatcagatacgacaccaaagcctttggttattgttacccctagtaataatagtcatatccaggctacaatattgtgtagtaagaaagtgggcctacaaataagaaccagatcaggtggtcatgatgcggaaggcatgtcttatatttctcaggtaccatttgtggtggttgatttgagaaacatgcacagtatcaagatagacgttcacagtcaaacggcatgggtggaggcgggtgctacattaggtgaagtttattactggatcaacgaaaagaatgaaaatctgtctttcccaggcggctactgtcctacagttggcgttggcgggcatttctctggcggtggttatggagccttgatgagaaactatggcttggccgcagataatataatcgacgctcacttggttaacgttgatggtaaggtccttgatagaaaatccatgggtgaagatttgttttgggcaattagggggggtggtggtgaaaattttggaattattgcggcctggaaaattaggttggtagcagttccttccagggcaaccattttttctgttaagagaaacatggaaattcatggcctggtgaaattgtttaacaagtggcagaacatcgcatacaagtacgataaagatttgttgttaatgacccactttattaccaggaacattattgataaccaaggtaaaaataagaccaccgtccatggatacttttcgtgcatatttcatggtggtgttgatagtctagttaatttaatgaacaaatcttatcctgaactagggatcaaaaaaactgattgcaaggaattctcttggatagacacaacaattttttacagtggtgtcgtcaatttcaatacagcaaattttaagaaagaaatattattagataggagtgcaggcaaaaagacggctttttctattaaactagattatgttaagaagccaattccagagacagcaatggtaaagatcctagagaaactatacgaagaggatgtcggagtcggaatgtacgttctttatccatatgggggtattatggaggagatatccgaaagcgcaatcccatttccccatagagccggaattatgtatgaattgtggtacaccgcttcatgggagaagcaggaggataacgaaaagcacataaattgggtaaggtcagtttacaattttacaacaccatacgtctcacagaatccgagattggcttatttgaactacagagacttggacctgggaaagacaaacccagagagcccaaacaattacactcaagcaaggatttggggtgaaaagtacttcggtaaaaatttcaataggctggtgaaagtcaagactaaggcggatccgaacaacttcttcaggaacgaacaatccattccaccacttcctccacatcaccac

SEQ ID NO: 29 - DNA, 1551 bp, Artificial Sequence
  Synthetic
aatcccagagaaaattttttgaagtgtttttcaaagcacatacctaacaacgtcgccaatccgaagcttgtttatacacaacacgatcaactatacatgtctattttgaatagtactattcagaatcttagatttatctcagacacaacacctaagccattggttattgtgacaccgtctaataattctcacattcaagcaacaatattgtgctcgaaaaaggttggcttgcagatcagaactagaagtggtggacatgatgcagaagggatgtcatatatatctcaagtacccttcgtagttgttgatttaagaaatatgcactctatcaaaatagatgtgcacagtcaaactgcttgggtcgaagctggcgcaactctaggggaggtgtactattggattaatgaaaaaaacgaaaatctatcctttcctggcggttactgcccgactgtaggtgtcggagggcacttcagtggtggtggatatggagctttgatgaggaactatggcttggctgcagataacattatagacgctcacctagtaaacgtagatgggaaagtcttagatagaaaatcaatgggtgaggatttgttttgggctattcgtggcggagggggcgaaaactttggtatcattgccgcatggaagataaaacttgtggctgttcccagcaaatcaactattttctctgttaagaagaatatggaaattcatgggttagttaaacttttcaataagtggcaaaatattgcctataaatatgacaaagatttggtattgatgacacatttcatcactaagaatatcactgacaatcatggaaagaacaaaacaacagtacacggttacttctcctcaattttccatggtggtgtcgattcccttgtcgatctgatgaacaagtctttccctgaactaggtataaagaaaaccgactgtaaagagttttcatggatagacacaacgatattttattcaggagtggtgaactttaacactgcaaatttcaaaaaggagattttattggacagatctgcaggtaagaagactgcctttagcattaaattggactatgtaaaaaagccgatcccagagaccgctatggttaaaatcttagaaaagttatacgaggaagacgtcggtgcaggaatgtatgtcttgtatccttatggcggtatcatggaagaaatatcagagtctgctatcccatttccacatagagcagggataatgtacgagttgtggtatactgcatcatgggaaaagcaagaggataacgaaaaacacataaactgggtaagatccgtttataattttactactccatacgtatctcaaaatcctagattagcttatttaaactacagagatttagatttagggaaaaccaaccatgctagtaggaacaactacacccaagccagaatatggggtgaaaaatactttggaaaaaattttaataggttagtaaaagtgaaaacaaaagtcgatcccaacaattttttcagaaacgagcaatccatacctcccttacctccgcaccatcac

SEQ ID NO: 30 - DNA, 1551 bp, Artificial Sequence
  Synthetic
aatccccaagaaaatttcctgaaatgtttcagcgagtatataccaaataaccctgcaaatcctaagtttatatatactcaacatgaccaactttacatgtctgttttaaattctaccattcaaaatttgagatttacaagcgataccactccaaaacctttggttatagtgacaccgagtaacgttagtcatattcaggcttcaatcttgtgctcgaaaaaggtgggattacaaattaggactcgtagcggaggtcatgattctgagggtatgagttacatttctcaagttcccttcgttgttgtggaccttaggaatatgcattccataaaaatagatgtacactctcagacagcatgggttgaagctggtgccacactgggggaagtatattattggatcaacgaaaagaacgagaacctgtcgtttcctggtggctattgcccaacagtcggtgtaggcggacactttagtggtggtggatacggtgccctaatgaggaactacggactagctgccgataatataatcgatgcacatctagtcaatgttgatggcaaagtcttagacaggaagtctatgggtgaagacctattctgggctataagaggtggtggtggggaaaatttcggtatcatagcggcatggaagataaaacttgtagctgtgcctagtaagtctaccattttctctgtaaaaaaaaacatggagattcacggtttggtgaagctttttaataaatggcaaaacattgcctacaaatacgataaagatttgctattgatgacacatttcataactagaaatattactgacaaccagggtaaaaacaagacggcaattcacacttacttttcttctgtttttttaggtggtgttgattctttagttgatttgatgaataagagttttccggaactgggcataaagaagaccgactgtaaggaattgtcttggatcgacaccaccattttttactccggagttgttaattacaatactactaattttcaaaaagagatattattagatagatcagctggcaagaaaacagccttttctatcaaattggattatgtaaaaaaacccatacctgaaacagctatggtgaagattttagaaaaattgtatgaagaagacgtgggcgtgggcatgtacgttctatacccctacggcggtattatggaagaaatttctgagagcgcgatccctttcccgcatagggcaggaatcatgtatgagttatggtacacggcatcgtgggaaaaacaagaagacaacgaaaagcatatcaactgggtgaggtctgtttacaattttacaactccctatgttagtcaaaatccaagattggcatacttaaattacagagatcttgacttgggaaaaacaaatccagaatcgcccaacaattacacgcaagccagaatctggggggaaaaatactttgggaaaaattttaacaggttagtcaaagtgaagactaaagccgatccaaataacttttttagaaatgagcagtctatccctccattaccgccacatcatcat

SEQ ID NO: 31 - DNA, 1551 bp, Artificial Sequence
  Synthetic
aatcctagagaaaatttcttgaaatgcttttccaaacacatccctaacaatgtcgccaatcccaaattagtttatactcaacatgatcaactatatatgtcaatattaaattctactattcaaaatttgagatttattagtgatactactccaaaacctctggtgattgtcactccaagcaacaattcccacatccaggcaacaatcttgtgtagcaagaaagtgggacttcaaattaggaccagatctggtggccatgatgcggaaggtatgtcatatattagtcaagttccgtttgtagtagttgatttgcgtaatatgcatagtatcaagatcgacgttcattcccaaacagcctgggtggaggcgggtgccactctgggggaagtttactactggataaatgagaagaacgagaatttatcatttccgggtggttactgccctacagtaggggtaggtggtcatttttcaggcggtggctacggggcattaatgaggaattatggattggctgctgataacataatagacgcccatttagtcaacgtagatgggaaagtgttggataggaagtctatgggtgaagacctattttgggcaatcagaggaggcggcggagagaacttcggtattattgccgcatggaaaataaagctagtcgccgtaccgtccaaatctactattttttccgtcaagaaaaatatggaaatccatgggctggttaaattgtttaataaatggcagaatatagcttataagtacgataaggatctggttcttatgactcattttattaccaaaaatataacagacaatcatgggaaaaacaaaactactgtacacggatatttctcaagtattttccatggcggggtagatagcttagtagacttgatgaataaatcgttcccagaattaggaattaagaagactgactgtaaggaattcagttggatagatacgaccattttctattcaggtgttgttaattttaacaccgccaactttaaaaaggaaattttactggacagatccgccggtaaaaagacagctttttcaatcaagttggattatgtaaaaaaacctataccagaaactgcaatggttaaaattcttgaaaagttatacgaagaggatgtcggagccggaatgtacgtattatacccttatgggggtatcatggatgaaatatctgaatcggctattccattccctcacagggcaggtattatgtatgaattgtggtataccgctagctgggagaagcaagaggataacgaaaagcacctgaattggataaggaacatttataattttatgactccatatgtctcaaaaaacccacgtttagcttacttaaattatcgtgatttggatataggtatcaacgacccaaagaatccaaataactacacccaagctagaatttggggtgagaaatactttggaaagaattttgataggctagtaaaagtgaagacacttgttgacccaaacaatttttttagaaacgaacaaagcattccacctttgcctcgtcatagacac

SEQ ID NO: 32 - DNA, 1623 bp, Artificial Sequence
  Synthetic
atgaaattcatttctacctttctcacttttattttagcggccgtttctgtcactgctaacccgcaagaaaactttctaaaatgcttttctgaatacattcctaacaaccctgccaacccgaagtttatctacacacaacacgatcaattgtatatgagcgtgttgaatagtacaatacagaacctgaggtttacatccgacacaacgccgaaaccgctagtgatcgtcacaccctccaacgtaagccacattcaggcaagcattttatgcagcaagaaagtcggactgcagataaggacgaggtccggaggacacgacgccgaagggatgagctatatctcccaggtaccttttgtggtggtagacttgagaaatatgcactctatcaagatagacgttcactcccaaaccgcttgggttgaggcgggagccacccttggtgaggtctactactggatcaacgaaaagaatgaaaattttagctttcctgggggatattgcccaactgtaggtgttggcggccacttctcaggaggcggttatggggccttgatgcgtaactacggacttgcggccgacaacattatagacgcacatctagtgaatgtagacggcaaagttttagacaggaagagcatgggtgaggatcttttttgggcaattagaggcggagggggagaaaattttggaattatcgctgcttggaaaattaagctagttgcggtaccgagcaaaagcactatattctctgtaaaaaagaacatggagatacatggtttggtgaagctttttaataagtggcaaaacatcgcgtacaagtacgacaaagatctggttctgatgacgcattttataacgaaaaatatcaccgacaaccacggaaaaaacaaaaccacagtacatggctacttctctagtatatttcatgggggagtcgattctctggttgatttaatgaacaaatcattcccagagttgggtataaagaagacagactgtaaggagttctcttggattgacacaactatattctattcaggcgtagtcaactttaacacggcgaatttcaaaaaagagatccttctggacagatccgcaggtaagaaaactgcgttctctatcaaattggactatgtgaagaagcctattcccgaaaccgcgatggtcaagatacttgagaaattatacgaggaagatgtgggagttggaatgtacgtactttatccctatggtgggataatggaagaaatcagcgagagcgccattccatttccccatcgtgccggcatcatgtacgagctgtggtatactgcgagttgggagaagcaagaagacaacgaaaagcacattaactgggtcagatcagtttacaatttcaccaccccatacgtgtcccagaatccgcgtctggcttacttgaactaccgtgatcttgacctgggtaaaacgaacccggagtcacccaacaattacactcaagctagaatctggggagagaaatactttgggaagaacttcaacaggttagtaaaggttaaaaccaaggcagatccaaacaacttttttagaaatgaacaatccattcccccgctacccccgcaccatcaccacgatgaattgtaa

SEQ ID NO: 33 - DNA, 1551 bp, Artificial Sequence
  Synthetic
aatcccagggagaattttttaaaatgcttttcgaagcatatcccaaacaatgtagctaatccaaagctggtttacacacaacacgatcaactatatatgtctatattgaacagtaccatccaaaacttaaggttcatatccgacacaactcctaaaccactagtaattgtgacgcctagcaacaattctcatatacaggcaaccatattatgttcaaagaaagttggattgcaaatccgtaccagatcaggtggtcacgatgcagagggcatgagctatatttctcaagtgccctttgtagtcgtggatcttagaaacatgcatagtatcaagatcgatgtgcactcacaaacagcttgggttgaggcaggtgccactctgggggaagtatattattggataaatgaaaaaaatgaaaatttaagtttcccagggggttactgtccgaccgttggagtaggtggacacttttccggggggggttatggcgctttgatgagaaactatggtttggctgctgacaacattatcgacgctcatcttgttaacgtagatggtaaagtacttgatagaaaaagcatgggcgaagaccttttctgggccataagaggtggcggtggggagaattttgggattattgctgcctggaagattaaattggttgccgtcccatcaaagtccacaattttctcggttaagaaaaacatggagatccacggtttagttaagttatttaacaagtggcagaacattgcctacaagtatgataaggatttgctacttatgacccactttattactagaaatatcactgacaatcaaggcaagaacaaaacagcaatacatacctactttagttcagtttttttaggtggagtagatagtctagttgatttaatgaataaatcctttccagaattggggattaaaaagaccgattgtaaagagttgtcctggattgatactacaattttttacagcggtgtagttaattttaatacagccaatttcaaaaaggaaattttattggacagatccgcagggaaaaaaacggccttttctattaaattagattatgttaaaaagcccattcccgaaacagctatggttaaaattttggaaaaactttacgaggaggacgtgggtgctggtatgtatgtattatatccgtatggcggtattatggatgaaatttccgagtcagcaattcccttcccacacagggctggaatcatgtatgaattatggtatactgcttcttgggagaagcaggaagataacgagaaacacattaattgggtaaggtcggtttacaattttaccactccctacgtatcgcaaaacccccgtttggcctatttaaattatagagacttagacttaggaaaaacaaacccagaatcgcctaacaattacacccaagcaaggatatggggagaaaaatattttggtaagaatttcaatcgtttagttaaggtgaagactaaagccgatccaaataactttttcaggaatgaacaatccatcccaccacttcctcctcatcatcat

SEQ ID NO: 34 - DNA, 1551 bp, Artificial Sequence
  Synthetic
aatccaagagaaaatttccttaaatgctttagcaagcatatccctaacaatgtcgcaaaccctaagcttgtgtacacgcaacatgatcagctttacatgtcgatccttaacagcactatacaaaatttgaggtttatttcagatacgaccccgaaacctttagtcattgtgactccatccaacaatagccatatacaagcaacaatattgtgtagtaagaaagtgggattgcaaatcaggaccagaagtggcggtcacgatgctgaaggaatgtcctacattagtcaagtccctttcgttgttgtagacttaaggaatatgcattcaattaaaatagacgttcattctcagaccgcttgggtcgaagcaggagcaacacttggcgaggtatactactggataaatgagaaaaacgaaaatctttcattcccaggtggttactgccctactgttggtgttggtggtcatttcagtggcggtggatatggagctttaatgaggaattacggtcttgctgccgacaatattattgacgctcatttagtcaatgtggacggaaaagtgttagataggaaaagcatgggtgaagatttattttgggccattagaggaggaggaggtgaaaattttggcattatagctgcatggaagattaaactagttgcagtcccctcaaaaagcactatcttttccgtaaagaaaaatatggaaattcatggtctggttaagttgtttaataagtggcaaaacatcgcttataagtatgataaagatcttgtgctaatgactcactttatcactaaaaatataactgataatcatggtaaaaataaaacaacagttcatggttatttttctagtatctttcatggtggcgtggatagcttagttgaccttatgaacaagtcgttcccagaactaggcattaagaagactgactgtaaagaattttcatggatcgacacaacaatcttttattccggtgttgttaacttcaacactgcaaattttaagaaagagatactattggatagatctgcgggtaaaaagacggctttctccattaaactggactacgtaaagaaaccaatccctgagaccgcaatggttaaaattttggaaaagttgtacgaagaagatgttggcgctggtatgtacgtcttatatccatatggtggaattatggacgaaatttctgagtctgctattcccttccctcatagagccggcatcatgtatgagttatggtacactgctagctgggagaaacaggaagataatgagaaacatttgaactggataaggagcgtctacaactttaccactccttacgtatcgcaaaatcctagactagcctacttaaattatagagatctggatttggggaagactaaccctgaatctcccaataattacacacaagctagaatatggggcgagaaatacttcggaaaaaattttaacaggttagtaaaggttaaaaccaaggcggatcctaacaatttcttccgtaatgaacaaagcattccacccttgccaccccaccatcat

SEQ ID NO: 35 - DNA, 54 bp, Artificial Sequence
  Synthetic
aaattcatttctacctttctcacttttattttagcggccgtttctgtcactgct

SEQ ID NO: 36 - protein, 516 aa, Cannabis sativa
NPQENFLKCFSEYIPNNPANPKFIYTQHDQLYMSVLNSTIQNLRFTSDTTPKPLVIVTPSNVSHIQASILCSKKVGLQIRTRSGGHDSEGMSYISQVPFVIVDLRNMRSIKIDVHSQTAWVEAGATLGEVYYWVNEKNENLSLAAGYCPTVCAGGHFGGGGYGPLMRNYGLAADNIIDAHLVNVHGKVLDRKSMGEDLFWALRGGGAESFGIIVAWKIRLVAVPKSTMFSVKKIMEIHELVKLVNKWQNIAYKYDKDLLLMTHFITRNITDNQGKNKTAIHTYFSSVFLGGVDSLVDLMNKSFPELGIKKTDCRQLSWIDTIIFYSGVVNYDTDNFNKEILLDRSAGQNGAFKIKLDYVKKPIPESVFVQILEKLYEEDIGAGMYALYPYGGIMDEISESAIPFPHRAGILYELWYICSWEKQEDNEKHLNWIRNIYNFMTPYVSKNPRLAYLNYRDLDIGINDPKNPNNYTQARIWGEKYFGKNFDRLVKVKTLVDPNNFFRNEQSIPPLPRHRH

SEQ ID NO: 37 - protein, 517 aa, Cannabis sativa
NPRENFLKCFSKHIPNNVANPKLVYTQHDQLYMSILNSTIQNLRFISDTTPKPLVIVTPSNNSHIQATILCSKKVGLQIRTRSGGHDAEGMSYISQVPFVVVDLRNMHSIKIDVHSQTAWVEAGATLGEVYYWINEKNENLSFPGGYCPTVGVGGHFSGGGYGALMRNYGLAADNIIDAHLVNVDGKVLDRKSMGEDLFWAIRGGGGENFGIIAAWKIRLVAVPSRATIFSVKRNMEIHGLVKLFNKWQNIAYKYDKDLLLMTHFITRNIIDNQGKNKTTVHGYFSCIFHGGVDSLVNLMNKSYPELGIKKTDCKEFSWIDTTIFYSGVVNFNTANFKKEILLDRSAGKKTAFSIKLDYVKKPIPETAMVKILEKLYEEDVGVGMYVLYPYGGIMEEISESAIPFPHRAGIMYELWYTASWEKQEDNEKHINWVRSVYNFTTPYVSQNPRLAYLNYRDLDLGKTNPESPNNYTQARIWGEKYFGKNFNRLVKVKTKADPNNFFRNEQSIPPLPPHHH

SEQ ID NO: 38 - protein, 517 aa, Cannabis sativa
NPRENFLKCFSKHIPNNVANPKLVYTQHDQLYMSILNSTIQNLRFISDTTPKPLVIVTPSNNSHIQATILCSKKVGLQIRTRSGGHDAEGMSYISQVPFVVVDLRNMHSIKIDVHSQTAWVEAGATLGEVYYWINEKNENLSFPGGYCPTVGVGGHFSGGGYGALMRNYGLAADNIIDAHLVNVDGKVLDRKSMGEDLFWAIRGGGGENFGIIAAWKIKLVAVPSKSTIFSVKKNMEIHGLVKLFNKWQNIAYKYDKDLVLMTHFITKNITDNHGKNKTTVHGYFSSIFHGGVDSLVDLMNKSFPELGIKKTDCKEFSWIDTTIFYSGVVNFNTANFKKEILLDRSAGKKTAFSIKLDYVKKPIPETAMVKILEKLYEEDVGAGMYVLYPYGGIMEEISESAIPFPHRAGIMYELWYTASWEKQEDNEKHINWVRSVYNFTTPYVSQNPRLAYLNYRDLDLGKTNHASRNNYTQARIWGEKYFGKNFNRLVKVKTKVDPNNFFRNEQSIPPLPPHHH

SEQ ID NO: 39 - protein, 517 aa, Cannabis sativa
NPQENFLKCFSEYIPNNPANPKFIYTQHDQLYMSVLNSTIQNLRFTSDTTPKPLVIVTPSNVSHIQASILCSKKVGLQIRTRSGGHDSEGMSYISQVPFVVVDLRNMHSIKIDVHSQTAWVEAGATLGEVYYWINEKNENLSFPGGYCPTVGVGGHFSGGGYGALMRNYGLAADNIIDAHLVNVDGKVLDRKSMGEDLFWAIRGGGGENFGIIAAWKIKLVAVPSKSTIFSVKKNMEIHGLVKLFNKWQNIAYKYDKDLLLMTHFITRNITDNQGKNKTAIHTYFSSVFLGGVDSLVDLMNKSFPELGIKKTDCKELSWIDTTIFYSGVVNYNTTNFQKEILLDRSAGKKTAFSIKLDYVKKPIPETAMVKILEKLYEEDVGVGMYVLYPYGGIMEEISESAIPFPHRAGIMYELWYTASWEKQEDNEKHINWVRSVYNFTTPYVSQNPRLAYLNYRDLDLGKTNPESPNNYTQARIWGEKYFGKNFNRLVKVKTKADPNNFFRNEQSIPPLPPHHH

SEQ ID NO: 40 - protein, 517 aa, Cannabis sativa
NPRENFLKCFSKHIPNNVANPKLVYTQHDQLYMSILNSTIQNLRFISDTTPKPLVIVTPSNNSHIQATILCSKKVGLQIRTRSGGHDAEGMSYISQVPFVVVDLRNMHSIKIDVHSQTAWVEAGATLGEVYYWINEKNENLSFPGGYCPTVGVGGHFSGGGYGALMRNYGLAADNIIDAHLVNVDGKVLDRKSMGEDLFWAIRGGGGENFGIIAAWKIKLVAVPSKSTIFSVKKNMEIHGLVKLFNKWQNIAYKYDKDLVLMTHFITKNITDNHGKNKTTVHGYFSSIFHGGVDSLVDLMNKSFPELGIKKTDCKEFSWIDTTIFYSGVVNFNTANFKKEILLDRSAGKKTAFSIKLDYVKKPIPETAMVKILEKLYEEDVGAGMYVLYPYGGIMDEISESAIPFPHRAGIMYELWYTASWEKQEDNEKHLNWIRNIYNFMTPYVSKNPRLAYLNYRDLDIGINDPKNPNNYTQARIWGEKYFGKNFDRLVKVKTLVDPNNFFRNEQSIPPLPRHRH

SEQ ID NO: 41 - skipped

SEQ ID NO: 42 - protein, 517 aa, Cannabis sativa
NPRENFLKCFSKHIPNNVANPKLVYTQHDQLYMSILNSTIQNLRFISDTTPKPLVIVTPSNNSHIQATILCSKKVGLQIRTRSGGHDAEGMSYISQVPFVVVDLRNMHSIKIDVHSQTAWVEAGATLGEVYYWINEKNENLSFPGGYCPTVGVGGHFSGGGYGALMRNYGLAADNIIDAHLVNVDGKVLDRKSMGEDLFWAIRGGGGENFGIIAAWKIKLVAVPSKSTIFSVKKNMEIHGLVKLFNKWQNIAYKYDKDLLLMTHFITRNITDNQGKNKTAIHTYFSSVFLGGVDSLVDLMNKSFPELGIKKTDCKELSWIDTTIFYSGVVNFNTANFKKEILLDRSAGKKTAFSIKLDYVKKPIPETAMVKILEKLYEEDVGAGMYVLYPYGGIMDEISESAIPFPHRAGIMYELWYTASWEKQEDNEKHINWVRSVYNFTTPYVSQNPRLAYLNYRDLDLGKTNPESPNNYTQARIWGEKYFGKNFNRLVKVKTKADPNNFFRNEQSIPPLPPHHH

SEQ ID NO: 43 - protein, 517 aa, Cannabis sativa
NPRENFLKCFSKHIPNNVANPKLVYTQHDQLYMSILNSTIQNLRFISDTTPKPLVIVTPSNNSHIQATILCSKKVGLQIRTRSGGHDAEGMSYISQVPFVVVDLRNMHSIKIDVHSQTAWVEAGATLGEVYYWINEKNENLSFPGGYCPTVGVGGHFSGGGYGALMRNYGLAADNIIDAHLVNVDGKVLDRKSMGEDLFWAIRGGGGENFGIIAAWKIKLVAVPSKSTIFSVKKNMEIHGLVKLFNKWQNIAYKYDKDLVLMTHFITKNITDNHGKNKTTVHGYFSSIFHGGVDSLVDLMNKSFPELGIKKTDCKEFSWIDTTIFYSGVVNFNTANFKKEILLDRSAGKKTAFSIKLDYVKKPIPETAMVKILEKLYEEDVGAGMYVLYPYGGIMDEISESAIPFPHRAGIMYELWYTASWEKQEDNEKHLNWIRSVYNFTTPYVSQNPRLAYLNYRDLDLGKTNPESPNNYTQARIWGEKYFGKNFNRLVKVKTKADPNNFFRNEQSIPPLPPHHH

SEQ ID NO: 44 - DNA, 81 bp, Artificial Sequence
  Synthetic
aaatgcagcacctttagcttttggtttgtgtgcaaaattattttttttttttttagctttaacattcagaccagcattgcg

SEQ ID NO: 45 - DNA, 1548 bp, Artificial Sequence
  Synthetic
aatccaagagaaaatttcttgaagtgtttttctcagtatatcccgaataatgcgacgaaccttaagttagtatacactcagaacaaccctctatatatgagcgttctaaattctacaatccacaacctaagatttacgtccgacacgactccgaaacccctagttatagtgacaccgtcacatgttagccatatacagggcaccatactatgttccaaaaaagttgggttacaaatacgtacccgtagcgggggacacgacagtgaggggatgagttatattagtcaggtgcctttcgtcatagtggatttaagaaatatgaggtcaattaaaatcgacgttcactcacaaactgcctgggttgaggcgggggccacattgggtgaagtatattactgggtcaatgagaagaacgagaatctttcactagcagccggttattgtcccacagtctgcgccggcggtcactttggcggcggcggatacggtcccttaatgagaaattacgggcttgccgcagacaatatcatagatgctcacttagttaatgttcatggaaaagtgttagaccgtaaaagcatgggggaggatctgttttgggcgcttagagggggaggggcagaatcatttggaataatagtggcatggaaaatcaggcttgtggctgttccaaagagtaccatgttctcagtaaagaaaataatggagatccatgagctagttaaacttgtgaataaatggcaaaacatagcctataaatatgataaggacttgctgcttatgactcatttcataaccagaaacattacggataaccaagggaagaacaaaacagccatccatacctactttagctccgttttcttgggtggtgtagacagcttagttgacctgatgaacaagagttttccggaactaggtatcaagaagacagattgtagacaactttcctggattgataccataatcttttacagcggagtcgtcaattatgacactgacaacttcaacaaggaaattttattagataggagtgcgggtcaaaatggggccttcaagatcaaactagactacgttaaaaaacccattcctgaaagtgtttttgttcagattctggagaagctgtatgaagaagatattggcgcggggatgtacgctctttatccgtacggcggcataatggatgagattagtgaaagcgccatccctttcccccacagagctggtatcctgtacgagttgtggtatatctgctcctgggagaaacaggaggataacgaaaagcacttaaattggattaggaatatctacaatttcatgacgccctacgtttccaagaaccccaggttggcctatttgaactacagggatcttgatattggaatcaacgaccccaaaaacccaaacaactacacccaggcaaggatttggggagagaagtacttcgggaagaacttcgacaggctagttaaggtgaaaacgctagttgatccaaataattttttcagaaacgaacagagtatccctcccttaccgcgtcataggcac

SEQ ID NO: 46 - DNA, 1554 bp, Artificial Sequence
  Synthetic
gctaatcctcgtgagaacttcttaaaatgctttagcaagcatatcccgaataacgttgcaaatccaaaacttgtatatacgcagcacgatcaactgtacatgtctatattgaacagtactattcaaaatctcaggtttatttcagacaccacaccaaagcccctagtgatcgtcactccatccaataactctcatattcaggccacaatattgtgttcgaaaaaggttgggttacaaattcgaacaagatcaggcggacacgatgcggaaggtatgtcctatattagtcaagtacctttcgttgtggtcgatcttagaaatatgcattctataaaaatcgacgttcattcgcagaccgcttgggtcgaagcaggagccactctgggtgaagtatactattggataaacgaaaaaaatgagaacttgtcttttccaggtggctactgtcctactgttggtgtcggtggtcacttctcagggggaggctatggtgcactcatgaggaattacggattagccgctgataacattatagacgctcatctagtgaatgtagatggtaaggtcttggatcgcaaatccatgggcgaagatctgttttgggcgatccgaggaggtgggggcgagaactttggcattattgctgcttggaagatcaagttagttgcagttccttcaaaatccacaatatttagcgtgaaaaagaatatggaaattcatggtttagtaaaacttttcaataagtggcaaaacattgcctataaatatgacaaagatttggttttaatgacgcacttcatcactaaaaacatcactgataatcatggtaagaataaaaccacagtgcacggttactttagttctattttccatgggggcgtggattctttggttgacctaatgaacaagtcgtttcccgagttgggtattaaaaagaccgattgcaaggaatttagttggatcgacaccaccatattctacagcggagttgttaattttaacactgcgaattttaaaaaagaaatcttactagataggtcagcagggaaaaagacagcattctcgataaaattagactatgttaagaaaccaatacccgaaacagctatggtaaaaattttggaaaaactctatgaagaggatgtaggggccggaatgtacgtgctgtatccttatggtggaattatggataaaatctccgagtctactataccatttccgcatcgggcgggtataatgtacgaagtctggtatatttgtagctgggagaagcaagaagataacgaaaaacacttgaattggattagaaatatttataattttatgacgccttacgtttccaagaacccaagacttgcttacttgaactacagagatctcgacattggcattaatgaccccaagaacccgaataattatacgcaagccaggatatggggagagaaatacttcggtaagaattttgacagattagtaaaagtaaaaacacttgttgacccaaataatttctttagaaacgaacagagtattccacccttgccgcgtcatcgccac

SEQ ID NO: 47 - DNA, 1551 bp, Artificial Sequence
  Synthetic
aatccccaggaaaacttcctgaagtgttttagcgagtatattccaaataaccctgcgaatccgaaatttatatacactcaacatgaccaattatatatgtctgtccttaactcaaccatccagaatttgcgtttcacatcggatactacgccaaaacctctagtgattgttacccccagtaatgtatcccacatccaagcttctatattgtgctcaaagaaaattggcttacaaataagaacaaggtccgggggacatgatagtgaaggtatgagctacattagtcaagttccatttgtagtcgtggacctcagaaacatgcattctatcaaaattgatgttcactcgcaaactgcctgggttgaagcaggagctacactgggtgaggtttattattggataaatgaaaagaatgagaacttgagcttccctggtggctactgtccaactgtcggtgtaggtggccatttttctggtggaggctacggggcgttaatgcgaaattatggtctagcagcagataacatcattgatgctcatttggtgaatgtagacggtaaagttcttgatcggaagtcaatgggagaagatctgttttgggccattcgcgggggaggtggagaaaactttggaataatcgccgcttggaaaattaagctagtcgccgttccgtccaaatcgacgattttctcagtcaagaagaatatggaaatacacggtttagttaaactgttcaacaaatggcagaatatagcatataagtatgacaaagatttagtgctaatgacacattttatcactaagaatattaccgacaatcacggcaaaaacaaaaccacggtgcatggttacttctctagcatatttcatggcggtgtagattctctcgttgatttgatgaataagagttttccagaattggggattaaaaaaacagattgtaaggagttctcatggattgataccactatcttttactccggcgtagtaaactttaatactgcaaactttaagaaagaaatcttacttgacagaagtgctggtaaaaagacagctttcagtattaagctcgattatgttaaaaagcccatacctgagactgctatggttaaaattttagaaaaattgtacgaagaagatgtgggagcaggaatgtatgtactatatccatacggtggtatcatggaagaaatatccgaatctgcgataccgtttccacatagagctggaatcatgtatgagttatggtatacggcatcctgggaaaagcaagaggacaatgaaaagcacattaattgggtcaggtcagtctataacttcacaactccttacgtgagtcaaaacccgaggttggcttaccttaattatagagacttggacttgggtaaaacaaatcacgcgtcgccaaacaattatacccaggctagaatttggggtgaaaagtactttggcaaaaactttaatcgtcttgttaaggttaaaactaaagttgatcccaataatttcttccgaaacgagcagtctattcctccattacctctgcatcatcac

SEQ ID NO: 48 - DNA, 1554 bp, Artificial Sequence
  Synthetic
gcaaatcctcaggaaaacttcctcaagtgtttttcccaatatatcccaacgaatgttaccaacgcgaaattggtatacactcaacatgatcaattttatatgagtattcttaattcaacaatacagaatctgcgcttcacttctgacaccacacccaaaccattagtgattataactccgttaaacgtcagccacatccaaggcacaatactatgctcgaagaaagttgggttacaaattaggactagatctggaggtcatgatgccgagggtatgtcatacatttctcaggtcccttttgtagtggttgacttgagaaatatgcacagtattaaaatcgatgttcattcccaaacagcttgggtagaagccggtgcaaccttgggcgaagtctattattggattaatgagaacaatgaaaacctatccttcccagctggatactgtccgactgttggtgctggaggtcacttttctggagggggttatggcgctctaatgcgtaattacggtttagcagcggataacattatcgatgcacaacttgtgaatgttgacggaaaggtactggatagaaaatcaatgggtgaagatcttttttgggcaataaggggtgggggtggcgagaacttcggcatcattgccgcttggaagatacgtttggtggccgttcctagtatgagcacgattttctcggttaaaaaaaatatggaaatacatgaattagtgaagctggtcaataagtggcagaatattgcgtatatgtacgagaaagaactgttgttgtttacacattttattacgcggaacataactgacaatcaaggtaaaaacaaaacgactatacattcctacttctcttctatttttcacggaggtgtggattcattagtagacttgatgaacaagtcattcccagaactaggcatcaagaaaaccgactgcaagcaactgtcttggatcgatacaataattttttattcaggcttagtcaattacaacaccactaacttcaagaaagagattctcttagatagaagtggtggaagaaaagctgcttttagcattaaattggattatgttaaaaaacccatcccagaatcggtctttgtccagatcctagaaaagctttacgaagaggatattggggccggtatgtatgcattatatccttatgggggtatcatggacgaaatatcagagtctgctatcccctttccacacagagcagggatattgtatgaactatggtacatatgttcttgggaaaaacaggaagataatgagaagcatcttaattggattcgaaatatttacaattttatgacaccatatgtttcgaagaaccctcggctcgcctatctcaattacagggatttagacatagggattaatgatcccaagaaccctaataattatactcaagccagaatctggggtgaaaagtactttggtaaaaatttcgatcgtttggttaaagtcaaaactttagtagatccgaacaactttttcagaaatgaacaaagcataccacccctgccacgccatagacat

SEQ ID NO: 49 - DNA, 1551 bp, Artificial Sequence
  Synthetic
aacccacgtgagaactttttgaaatgtttctctaagcatatccctaacaatgtggctaacccaaagttagtttacacacagcacgatcaactatatatgagcattttgaactccactatccaaaatctgaggttcattagtgacaccacgcccaaaccattggttattgtaaccccttctaataactctcatatccaagctactatattatgttccaagaaggtcggcttgcaaattagaactagatcaggaggtcacgatgctgaaggtatgtcatacatttcccaagttccattcgttgttgtagacctaagaaatatgcactctatcaaaattgatgtccattctcaaacagcctgggtcgaagctggtgctaccttgggtgaagtttattactggattaacgaaaagaatgaaaacttgtcgttcccaggtggttactgtccaaccgtgggtgttggtggacactttagcggtggtggatacggcgccttgatgagaaactatggtttagctgctgacaatatcatcgatgcacaccttgtcaacgttgatggtaaggtattggacagaaaatcaatgggtgaagacttgttctgggctataagaggtggcggtggtgagaactttggtatcatcgctgcatggaagattaagttagttgccgtcccatctaagtccactatcttcagtgttaaaaagaacatggaaattcatggtttggtcaagctatttaataaatggcagaacatcgcttacaagtacgataaggacttacttttgatgacccattttataactaaaaacattactgataaccacggtaaaaataagactacagttcacggttatttctcctctatcttccatggtggagttgactctctggtcgacctaatgaacaagtccttcccagaattgggtattaagaagactgattgcaaagaattttcatggatcgataccaccattttctactctggcgtggttaactttaatacggctaactttaagaaggaaatattgttagaccgttcggccggtaagaaaaccgctttttctataaagttggattatgttaagaaacctattcctgaaacagccatggtcaagatcttagaaaaattgtacgaagaggatgtaggagctggtatgtacgttctttacccatatggtggtattatggaagaaatatctgagtctgccattccattcccacatagggcaggcattatgtacgaattgtggtatactgctagctgggaaaagcaagaagacaatgaaaaacacataaattgggttagaagtgtatacaatttcactaccccctacgtcagccaaaacccaagattggcctatctaaactaccgtgacctggacctaggtaaaactaaccacgcttcaccaaacaactacacccaagctagaatctggggagagaagtatttcggtaagaatttcaacagattggtcaaagtgaagaccaaggtcgatccaaataattttttcagaaacgagcaatctattcccccattaccaccacatcatcac

SEQ ID NO: 50 - DNA, 1551 bp, Artificial Sequence
  Synthetic
aatcccagggagaactttcttaagtgtttcagtaaacatatcccaaataacgtggcgaatccgaaattagtatacacgcaacacgatcagctatatatgagcattctgaatagtaccattcaaaacttgcgctttatatcggacacaactccaaagcctttagtcatagttactccttcaaataattcccatattcaggctacaatcctctgctctaaaaaagttgggttgcaaatacgtactagatcaggaggccacgatgccgaaggtatgtcttatatctcccaagtgccattcgttgtcgtcgacttgaggaacatgcattctattaagattgatgtacactcccagaccgcatgggttgaagctggtgccacattaggtgaagtatactattggataaacgagaaaaatgaaaatttatcgtttcctggaggctattgtccaactgttggtgtcggtggtcatttctcaggcgggggctacggagcattgatgcgaaactacggactagcagctgataacattatagacgcccatctcgtgaatgtggatggtaaagttcttgatagaaagagcatgggtgaagatttgttttgggcgatcagaggcggtggaggggaaaactttggtattattgcggcttggaaaataaagctggtcgcagttccctcgaaaagcacaatcttttctgtaaagaaaaatatggaaatacatgggttggtcaagttattcaataaatggcaaaacattgcttataagtatgataaagacctcgttctgatgactcattttattacgaaaaatattaccgacaatcacggtaagaataaaactacagtgcacggttacttttcttcaattttccatggtggcgttgactctctagtagatttaatgaacaaaagtttccctgagttagggatcaagaaaacggattgtaaagaattttcttggatcgacacaaccatattctattcgggtgttgttaactttaataccgcaaactttaaaaaggaaattttgttagatcgctctgctggaaagaaaacagcatttagtatcaaacttgactatgtaaagaaaccgatacccgagactgccatggttaagatacttgagaagctatacgaagaggatgtgggagctggcatgtacgttctctacccttacggcggtataatggaagaaatttcagaatccgcaatcccattcccacacagagcaggtattatgtatgaactgtggtatactgcctcatgggagaaacaagaagataacgaaaaacacattaattgggtccgtagcgtctacaatttcactacaccatatgtatcccaaaacccgagattggcttacttgaattatagagacttggatctaggaaaaaccaatcatgccagcccgaataattatacacaggcaaggatttggggcgagaagtatttcggcaagaacttcaacagattagtaaaagttaagaccaaagttgaccccaataacttttttagaaatgaacaaagtatccctccactcccaccacatcatcat

SEQ ID NO: 51 - DNA, 1551 bp, Artificial Sequence
  Synthetic
aacccccgtgaaaatttcttgaaatgtttttccaagcatataccgaataacgttgcgaatcctaaacttgtctatacacagcacgatcaactctacatgagcctactgaactcaacgattcaaaatttaagatttatctcggacaccactccaaagccattagtgattgttaccccttctaataatagtcatatacaggctacaattttgtgctccaaaaaggtaggattgcaaatcaggacacgatcaggcgggcacgatgcagagggtatgtcttatatcagtcaagtacctttcgttgtggtcgatctgaggaacatgcattcgattaaaatagacgtacactctcagactgcctgggtggaagctggtgcaactctcggcgaagtttactattggattaacgaaaataacgagaatttatcctttccagccggatactgtccgactgtaggtgctggtggacatttctcaggtggtggttatggcgcactaatgagaaattacgggcttgctgctgataatattatagacgcgcaattagttaacgtcgatggcaaagtattggacagaaagtctatgggtgaagatctgttttgggccatccgcgggggaggaggtgagaattttggcatcattgcagcttggaaaattcgtttggttgctgtcccatcaatgagcacgattttctctgttaagaagaatatggaaatacatgagttagttaaattggtgaacaaatggcaaaacatagcctatatgtatgaaaaggaacttcttttatttactcattttatcacaagaaacattactgataatcagggtaaaaacaaaaccaccattcacagttactttagttcgatcttccatggaggtgtcgattcattagtggacctaatgaataagagtttcccagaactaggcatcaagaaaacagactgtaaacaactctcctggattgatacgatcattttttattctggactggttaattataatacaaccaatttcaaaaaggaaatactcttggatagaagcggcggtcgtaaagcagcattctcaataaagctcgattacgtaaaaaaacccatacctgagactgccatggtgaagattttagaaaaactatacgaggaagatgtgggtgttggaatgtatgtcttgtacccatacgggggtattatggaagaaatcagtgaatctgcaataccttttccacatagagcagggattatgtatgagctatggtataccgcctcttgggaaaagcaggaagataatgagaaacacattaactgggtaaggtctgtttataattttacgaccccctatgtctctcaaaatcctcgcttggcttatttaaactacagagacttggatctaggaaaaacaaaccctgagtcgcccaacaattacactcaagctcgaatttggggcgaaaagtactttggtaagaatttcaatagattagtcaaggttaaaacaaaagctgacccaaacaatttctttcgtaacgaacagagtattccacctcttccgccacaccatcat

SEQ ID NO: 52 - DNA, 1548 bp, Artificial Sequence
  Synthetic
aatccaagagaaaatttcttgaagtgtttttctcagtatatcccgaataatgcgacgaaccttaagttagtatacactcagaacaaccctctatatatgagcgttctaaattctacaatccaaaacctaagatttacgtccgacacgactccgaaacccctagttatagtgacaccgtcacatgttagccatatacagggcaccatactatgttccaaaaaagttgggttacaaatacgtacccgtagcgggggacacgacagtgaggggatgagttatattagtcaggtgcctttcgtcatagtggatttaagaaatatgaggtcaattaaaatcgacgttcactcacaaactgcctgggttgaggcgggggccacattgggtgaagtatattactgggtcaatgagaagaacgagaatctttcactagcagccggttattgtcccacagtctgcgccggcggtcactttggcggcggcggatacggtcccttaatgagaaattacgggcttgccgcagacaatatcatagatgctcacttagttaatgttcatggaaaagtgttagaccgtaaaagcatgggggaggatctgttttgggcgcttagagggggaggggcagaatcatttggaataatagtggcatggaaaatcaggcttgtggctgttccaaagagtaccatgttctcagtaaagaaaataatggagatccatgagctagttaaacttgtgaataaatggcaaaacatagcctataaatatgataaggacttgctgcttatgactcatttcataaccagaaacattacggataaccaagggaagaacaaaacagccatccatacctactttagctccgttttcttgggtggtgtagacagcttagttgacctgatgaacaagagttttccggaactaggtatcaagaagacagattgtagacaactttcctggattgataccataatcttttacagcggagtcgtcaattatgacactgacaacttcaacaaggaaattttattagataggagtgcgggtcaaaatggggccttcaagatcaaactagactacgttaaaaaacccattcctgaaagtgtttttgttcagattctggagaagctgtatgaagaagatattggcgcggggatgtacgctctttatccgtacggcggcataatggatgagattagtgaaagcgccatccctttcccccacagagctggtatcctgtacgagttgtggtatatctgctcctgggagaaacaggaggataacgaaaagcacttaaattggattaggaatatctacaatttcatgacgccctacgtttccaagaaccccaggttggcctatttgaactacagggatcttgatattggaatcaacgaccccaaaaacccaaacaactacacccaggcaaggatttggggagagaagtacttcgggaagaacttcgacaggctagttaaggtgaaaacgctagttgatccaaataattttttcagaaacgaacagagtatccctcccttaccgcgtcataggcac

SEQ ID NO: 53 - DNA, 1551 bp, Artificial Sequence
  Synthetic
aacccacgtgagaactttttgaaatgtttctctaagcatatccctaacaatgtggctaacccaaagttagtttacacacagcacgatcaactatatatgagcattttgaactccactatccaaaatctgaggttcattagtgacaccacgcccaaaccattggttattgtaaccccttctgataactctcatatccaagctactatattatgttccaagaaggtcggcttgcaaattagaactagatcaggaggtcacgatgctgaaggtatgtcatacatttcccaagttccattcgttgttgtagacctaagaaatatgcactctatcaaaattgatgtccattctcaaacagcctgggtcgaagctggtgctaccttgggtgaagtttattactggattaacgaaaagaatgaaaacttgtcgttcccaggtggttactgtccaaccgtgggtgttggtggacactttagcggtggtggatacggcgccttgatgagaaactatggtttagctgctgacaatatcatcgatgcacaccttgtcaacgttgatggtaaggtattggacagaaaatcaatgggtgaagacttgttctgggctataagaggtggcggtggtgagaactttggtatcatcgctgcatggaagattaagttagttgccgtcccatctaagtccactatcttcagtgttaaaaagaacatggaaattcatggtttggtcaagctatttaataaatggcagaacatcgcttacaagtacgataaggacttagttttgatgacccattttataactaaaaacattactgataaccacggtaaaaataagactacagttcacggttatttctcctctatcttccatggtggagttgactctctggtcgacctaatgaacaagtccttcccagaattgggtattaagaagactgattgcaaagaattttcatggatcgataccaccattttctactctggcgtggttaactttaatacggctaactttaagaaggaaatattgttagaccgttcggccggtaagaaaaccgctttttctataaagttggattatgttaagaaacctattcctgaaacagccatggtcaagatcttagaaaaattgtacgaagaggatgtaggagctggtatgtacgttctttacccatatggtggtattatggaagaaatatctgagtctgccattccattcccacatagggcaggcattatgtacgaattgtggtatactgctagctgggaaaagcaagaagacaatgaaaaacacataaattgggttagaagtgtatacaatttcactaccccctacgtcagccaaaacccaagattggcctatctaaactaccgtgacctggacctaggtaaaactaaccacgcttcaccaaacaactacacccaagctagaatctggggagagaagtatttcggtaagaatttcaacagattggtcaaagtgaagaccaaggtcgatccaaataattttttcagaaacgagcaatctattcccccattaccaccacatcatcac

SEQ ID NO: 54 - DNA, 1551 bp, Artificial Sequence
  Synthetic
aacccccaagagaatttcctaaaatgcttttcagaatacattccgaataacccagcgaatcctaagtttatatatacgcagcatgaccaattatatatgtccgtactgaatagcactatccaaaaccttcgtttcaccagtgatacaactccaaaacctttggtgattgttacaccatctaatgtttcacacatccaggcatcgatattgtgtagcaagaaaattgggttacaaatccggaccaggtctggtggacatgattctgaaggtatgagttacatttcccaggtgccttttgtcgtagttgacctgagaaacatgcactccataaagattgatgtccattcacaaactgcctgggttgaagctggcgctacactcggtgaggtatattactggattaatgaaaaaaacgaaaatttatctttcccaggaggctattgtccgaccgtgggtgttggtggacactttagcggtggtggctatggggccttaatgcgcaattacggactagcagcggataacattatagatgctcatctagtaaacgtcgacggaaaggttttggatagaaaatctatgggggaggaccttttctgggcaatcagaggcggtggtggagaaaattttggtattatagctgcctggaagatcaaattggtcgctgttccttcgaaaagtacgatattttcagtgaagaagaatatggaaattcatggtttagtgaaattgtttaataaatggcaaaacatagcctataagtatgataaagatctggtcctaatgacccatttcatcacaaagaatattactgataaccacggaaaaaacaaaaccactgttcatggttactttagttccatattccatgggggtgttgacagcttggtagacttaatgaataaatcatttccagaattaggcatcaagaaaacggattgcaaggagttctcttggattgacacaactatattttacagcggtgttgttaattttaacaccgcaaattttaaaaaggaaattttactggatagatctgctggcaaaaagacagcgttcagtataaaactagactatgtaaagaaacctatacccgagactgccatggtgaaaatcttggaaaaactttatgaagaggatgttggtgcaggcatgtatgtcctttacccatacggcggaattatggaagagatctcggaatccgcgattccttttccccatagggcaggtattatgtatgaactctggtacactgcttcgtgggaaaagcaggaagataatgaaaaacacatcaattgggtccgatcagtgtataatttcacaacaccatacgtatcacaaaatcctaggctagcttatttgaattaccgtgatttagatcttgggaaaacgaaccacgccagtcccaacaattatacacaggcacgcatctggggtgaaaagtatttcggaaaaaacttcaacagacttgtaaaagtaaagactaaggtggatccaaacaatttttttagaaatgagcaatctatccctccgttgccattgcaccatcat

SEQ ID NO: 55 - DNA, 1551 bp, Artificial Sequence
  Synthetic
aatccgcaagaaaactttctaaaatgtttctcccagtacattcccactaatgttaccaacgccaagttggtatatacgcaacatgaccaattttatatgtcgatcctcaattctacaatacaaaacctgcgtttcacaagtgataccactccaaaaccattagtgattatcactcctttgaatgttagccacatacagggcacaattttatgctcaaagaaagtcggtctgcaaattagaactcgatcagggggtcatgatgctgagggaatgtcttacatcagccaggtgccttttgttgtagtcgatcttagaaatatgcactcaataaaaattgacgttcattctcaaaccgcatgggtcgaagcgggtgctacgttaggagaagtgtattactggatcaacgagaataacgaaaatttgtcctttccagccggctattgtcctaccgttggtgcagggggtcatttcagtggaggaggttacggtgctctaatgaggaattatggcttggcagctgataatataattgacgcccagcttgtaaacgttgatggcaaggttttagaccgcaaatccatgggggaggatctattttgggcaataagaggaggtggtggggaaaacttcggcattattgccgcttggaagattagattagtggctgtgccaagtatgtctactatcttttccgtaaaaaagaacatggaaatccacgagcttgtaaaactcgtcaataagtggcaaaatattgcatatatgtatgaaaaagaactcttgcttttcacacattttattacgcggaacataacagataatcaagggaaaaataagactacaatacattcatacttcagttcaatttttcatggtggcgtcgattctctggttgatttaatgaataaaagttttcccgaactgggtatcaagaaaactgactgcaaacaattgtcgtggattgatactatcattttctactctggtctagtaaactacaacactacaaattttaagaaggaaattttattggacaggtcgggtggaagaaaagctgcgtttagcataaaactagactatgttaaaaagccgatacctgaaacagcaatggtcaaaattttagagaaattgtacgaagaggatgttggggtaggaatgtatgtactctacccatatggcggtataatggaagaaatctctgaatccgcgatcccatttccccacagagccggaattatgtacgagctttggtatacggcatcttgggaaaagcaagaagataacgaaaagcacattaactgggtgcgttcagtttataatttcaccacaccgtatgtaagccagaatcctagactagcttatttaaattaccgcgatctggatttggggaaaactaaccctgaatcaccaaataattatactcaagccaggatatggggcgaaaaatatttcggtaagaatttcaacagactcgtcaaggtcaaaaccaaagcagacccaaataatttttttaggaatgagcagagcatacccccccttccgccacatcatcac

SEQ ID NO: 56 - DNA, 1551 bp, Artificial Sequence
  Synthetic
aacccgcaggagaatttccttaagtgcttttctcaatacatcccaacgaatgtcactaacgccaaattagtatatacacaacacgaccaattttatatgtcgattttgaatagtaccatacagaatctcaggttcacttccgatacaacccccaaaccactggttattattactcctctaaacgtgagccatatccaagggacaatattatgttctaagaaagttggtttgcaaatcagaacacgctcaggcggtcatgatgctgaaggaatgtcttacatttcacaggtcccttttgtagtggttgatttacgtaacatgcactcaattaagatagacgttcatagtcaaacggcatgggtcgaagcgggtgctactttgggagaggtttattactggattaatgaaaataacgaaaatctttccttcccagccggctattgtcctaccgtaggtgcaggaggtcattttagcgggggcggttatggagctctaatgagaaactacggtttagcggcagataatatcattgacgcacaacttgtgaatgtagatggtaaagtattggatagaaaatcgatgggggaagatctattttgggccatccgaggagggggtggtgagaacttcggcataattgctgcttggaagattaggttagttgctgtgccaagcatgtccactatattctctgttaaaaagaatatggaaatacacgaattagttaaactggtcaataaatggcagaacatcgcgtatatgtatgagaaggaattgttgctatttacacattttatcacaagaaacattaccgacaaccagggaaaaaataagacgactatccattcgtactttagttcaatattccacggaggtgtggatagcctggttgacctcatgaataaatcgtttcccgagctgggtattaagaaaactgactgcaagcaactttcttggatcgataccattatattctattccggacttgtcaactacaatacaactaattttaagaaagaaattttgttagatcggtcaggtggccgaaaagctgcatttagtatcaaactggattacgttaaaaagccaataccagaaacggccatggtgaaaattcttgagaagctctatgaagaagatgtgggtgtcggtatgtatgtcttatacccgtacggtggtataatggaagaaatatcagaaagtgcaataccttttccgcacagagccggcattatgtatgagttgtggtataccgcttcttgggaaaaacaagaggataacgaaaagcatataaactgggtccggagcgtttacaatttcactactccttatgtatctcaaaaccctagactagcctatttaaattatagggatcttgacttgggcaaaacgaacccagagtcgccaaataattatacacaagcaagaatttggggcgagaaatatttcgggaaaaattttaaccgtttggttaaggttaaaaccaaggccgaccccaataattttttcagaaatgaacagtctatcccacccttacctccacatcaccat

SEQ ID NO: 57 - DNA, 1551 bp, Artificial Sequence
  Synthetic
aatcctcgagaaaacttcttaaagtgtttttcaaaacacatacccaataacgttgccaatccgaaacttgtctacacccagcatgaccaactgtatatgtctctactcaactcgacgattcaaaatttacggtttatcagtgatactacaccaaagccattggtaattgtgacaccttccaacaatagtcatatacaagcgactatcttgtgcagcaaaaaggttggactacagattcgcacacgttcagggggccacgatgcagagggtatgtcttatatatctcaagtgccattcgtagttgtcgacttgagaaatatgcatagcattaaaattgatgttcactcccaaactgcttgggtagaagctggtgcaacccttggtgaagtctactattggatcaatgaaaacaatgagaacctgtcttttcccgccggatactgtcctactgttggcgctggtggccatttttcaggtggaggttatggcgcgttaatgaggaattatgggcttgccgctgataacataatcgatgcacagttggtgaacgtagacggtaaagttttggacagaaagtctatgggggaggatttattctgggctatcagaggcggaggtggtgaaaatttcggtattattgcagcatggaaaattaggttggttgctgtaccatccatgtcaacgatttttagcgttaagaaaaatatggaaatacatgagctagtaaaattagttaataagtggcaaaacattgcgtacatgtatgaaaaggaacttttactatttacgcattttatcacaagaaatatcaccgataatcaaggtaaaaacaaaactaccatacatagttacttctcatctatcttccacggaggagtggattctctcgtcgacttgatgaataaaagttttccggaactgggcataaagaaaaccgactgtaagcaattatcctggattgatacaatcattttttactcgggcctcgtaaactataatacaactaacttcaaaaaggaaatactgctagatagaagtggtggtcgtaaggctgctttttcaattaaactggactatgttaaaaagccaatacctgaaactgcaatggtcaaaatcttggagaaattgtacgaggaagatgtcggagttggtatgtatgtgttgtatccctatggtgggattatggaagagatatccgaatctgcgatcccattcccacatcgagccggaattatgtatgaattatggtacacagcctcctgggagaagcaggaagataatgaaaagcatattaattgggttagaagcgtgtataactttactacaccttacgtgagccaaaacccgcggttagcttatctgaattatagggatttggatctggggaaaactaatcctgaatcgccaaataattacacccaggctagaatctggggtgaaaagtactttggtaaaaattttaacagacttgtcaaagttaaaacaaaagccgaccctaacaattttttccgtaacgaacaatcaattcccccgcttccacctcaccatcac

SEQ ID NO: 58 - DNA, 1548 bp, Artificial Sequence
  Synthetic
aatccaagagaaaatttcttgaagtgtttttctcagtatatcccgaataatgcgacgaaccttaagttagtatacactcagaacaaccctctatatatgagcgttctaaattctacaatccgtaacctaagatttacgtccgacacgactccgaaacccctagttatagtgacaccgtcacatgttagccatatacagggcaccatactatgttccaaaaaagttgggttacaaatacgtacccgtagcgggggacacgacagtgaggggatgagttatattagtcaggtgcctttcgtcatagtggatttaagaaatatgaggtcaattaaaatcgacgttcactcacaaactgcctgggttgaggcgggggccacattgggtgaagtatattactgggtcaatgagaagaacgagaatctttcactagcagccggttattgtcccacagtctgcgccggcggtcactttggcggcggcggatacggtcccttaatgagaaattacgggcttgccgcagacaatatcatagatgctcacttagttaatgttcatggaaaagtgttagaccgtaaaagcatgggggaggatctgttttgggcgcttagagggggaggggcagaatcatttggaataatagtggcatggaaaatcaggcttgtggctgttccaaagagtaccatgttctcagtaaagaaaataatggagatccatgagctagttaaacttgtgaataaatggcaaaacatagcctataaatatgataaggacttgctgcttatgactcatttcataaccagaaacattacggataaccaagggaagaacaaaacagccatccatacctactttagctccgttttcttgggtggtgtagacagcttagttgacctgatgaacaagagttttccggaactaggtatcaagaagacagattgtagacaactttcctggattgataccataatcttttacagcggagtcgtcaattatgacactgacaacttcaacaaggaaattttattagataggagtgcgggtcaaaatggggccttcaagatcaaactagactacgttaaaaaacccattcctgaaagtgtttttgttcagattctggagaagctgtatgaagaagatattggcgcggggatgtacgctctttatccgtacggcggcataatggatgagattagtgaaagcgccatccctttcccccacagagctggtatcctgtacgagttgtggtatatctgctcctgggagaaacaggaggataacgaaaagcacttaaattggattaggaatatctacaatttcatgacgccctacgtttccaagaaccccaggttggcctatttgaactacagggatcttgatattggaatcaacgaccccaaaaacccaaacaactacacccaggcaaggatttggggagagaagtacttcgggaagaacttcgacaggctagttaaggtgaaaacgctagttgatccaaataattttttcagaaacgaacagagtatccctcccttaccgcgtcataggcac

SEQ ID NO: 59 - DNA, 1551 bp, Artificial Sequence
  Synthetic
aaccccagagagaatttcctcaagtgttttagcaaacatatcccaaataacgttgccaatcctaaattagtgtacactcagcacgaccaattgtatatgtcactgcttaactcgaccattcaaaatctacgctttatatctgatacgacaccgaagccattagtaattgttactccttccaacaatagtcatatacaagcgacaattttgtgctctaaaaaagtaggactacagatcaggacccgttcagggggccacgatgcagaaggtatgagctatatatctcaagtcccattcgttgtggttgatttgagaaatatgcatagtattaagattgacgtccactcacaaaccgcttgggtagaagctggtgccacattaggtgaagtttactattggatcaatgagaaaaacgaaaatctgtcctttcctggaggctactgtcccacggtcggggtgggtgggcatttctccggtggcggatatggtgcattaatgcgaaattacggtctagctgcggataacatcatagacgcacatttggtaaacgttgatggtaaagtgctcgatagaaagagcatgggcgaagatcttttttgggctattagaggaggaggtggcgagaactttggaattatcgcagcctggaagattaaactggttgctgtgccatctaaaagtactatattctctgtcaaaaagaatatggaaatccatggattagtaaaattatttaacaagtggcagaatatagcctataaatacgacaaggacttggtattgatgacacactttattactaaaaatattacagataaccacggtaagaataagactaccgtgcatgggtatttctcatctatttttcatggtggagtcgattcgctagttgacttgatgaataagtctttcccagagctgggtataaaaaagacggattgtaaagaatttagttggatagacactaccatattttattccggtgttgtgaatttcaacaccgccaatttcaaaaaagaaatcctgcttgataggtcggctggtaaaaagacagcattctctattaagcttgattacgttaaaaagcccattcctgaaactgcgatggtaaaaattttggagaagttatacgaagaagatgtgggggcaggaatgtatgtcctttacccatatggaggcatcatggaagagatttcagagtcggctataccgtttcctcacagagctggtattatgtatgaaatctggtatatcgctagctgggaaaaacaagaggataatgaaaaacatataaattggattaggaatgtttataactttactacaccatacgtcagccagaatcctagaatggcatacttaaattatcgggacctggacctgggtaaaaccaactttgaatcacccaataactatacgcaagctaggatttggggcgaaaaatactttggtaagaatttcaaccgtctagtgaaagtaaagacaaaagttgatccggacaacttttttagaaatgaacaatctatcccacctttgccgttacgtcatcat

SEQ ID NO: 60 - DNA, 1548 bp, Artificial Sequence
  Synthetic
aatccaagagaaaatttcttgaagtgtttttctcagtatatcccgaataatgcgacgaaccttaagttagtatacactcagaacaaccctctatatatgagcgttctaaattctacaatccacaacctaagatttacgtccgacacgactccgaaacccctagttatagtgacaccgtcacatgttagccatatacagggcaccatactatgttccaaaaaagttgggttacaaatacgtacccgtagcgggggacacgacagtgaggggatgagttatattagtcaggtgcctttcgtcatagtggatttaagaaatatgaggtcaattaaaatcgacgttcactcacaaactgcctgggttgaggcgggggccacattgggtgaagtatattactgggtcaatgagaagaacgagaatctttcactagcagccggttattgtcccacagtctgcgccggcggtcactttggcggcggcggatacggtcccttaatgagaaattacgggcttgccgcagacaatatcatagatgctcacttagttaatgttcatggaaaagtgttagaccgtaaaagcatgggggaggatctgttttgggcgcttagagggggaggggcagaatcatttggaataatagtggcatggaaaatcaggcttgtggctgttccaaagagtaccatgttctcagtaaagaaaataatggagatccatgagctagttaaacttgtgaataaatggcaaaacatagcctataaatatgataaggacttgctgcttatgactcatttcataaccagaaacattacggataaccaagggaagaacaaaacagccatccatacctactttagctccgttttcttgggtggtgtagacagcttagttgacctgatgaacaagagttttccggaactaggtatcaagaagacagattgtagacaactttcctggattgataccataatcttttacagcggagtcgtcaattatgacactgacaacttcaacaaggaaattttattagataggagtgcgggtcaaaatggggccttcaagatcaaactagactacgttaaaaaacccattcctgaaagtgtttttgttcagattctggagaagctgtatgaagaagatattggcactgggatgtacgctctttatccgtacggcggcataatggatgagattagtgaaagcgccatccctttcccccacagagctggtatcctgtacgagttgtggtatatctgctcctgggagaaacaggaggataacgaaaagcacttaaattggattaggaatatctacaatttcatgacgccctacgtttccaagaaccccaggttggcctatttgaactacagggatcttgatattggaatcaacgaccccaaaaacccaaacaactacacccaggcaaggatttggggagagaagtacttcgggaagaacttcgacaggctagttaaggtgaaaacgctagttgatccaaataattttttcagaaacgaacagagtatccctcccttaccgcgtcataggcac

SEQ ID NO: 61 - DNA, 1548 bp, Artificial Sequence
  Synthetic
aatccaagagaaaatttcttgaagtgtttttctcagtatatcccgaataatgcgacgaaccttaagttagtatacactcagaacaaccctctatatatgagcgttctaaattctacaatccacaacctaagatttacgtccgacacgactccgaaacccctagttatagtgacaccgtcacatgttagccatatacagggcaccatactatgttccaaaaaagttgggttacaaatacgtacccgtagcgggggacacgacagtgaggggatgagttatattagtcaggtgcctttcgtcatagtggatttaagaaatatgaggtcaattaaaatcgacgttcactcacaaactgcctgggttgaggcgggggccacattgggtgaagtatattactgggtcaatgagaagaacgagaatctttcactagcagccggttattgtcccacagtctgcgccggcggtcactttggcggcggcggatacggtcccttaatgagaaattacgggcttgccgcagacaatatcatagatgctcacttagttaatgttcatggaaaagtgttagaccgtaaaagcatgggggaggatctgttttgggcgcttagagggggaggggcagaatcatttggaataatagtggcatggaaaatcaggcttgtggctgttccaaagagtaccatgttctcagtaaagaaaataatggagatccatgagctagttaaacttgtgaataaatggcaaaacatagcctataaatatgataaggacttgctgcttatgactcatttcataaccagaaacattacggataaccaagggaagaacaaaacagccatccatacctactttagctccgttttcttgggtggtgtagacagcttagttgacctgatgaacaagagttttccggaactaggtatcaagaagacagattgtagacaactttcctggattgataccataatcttttacagcggagtcgtcaattatgacactgacaacttcaacaaggaaattttattagataggagtgcgggtcaaaatggggccttcaagatcaaactagactacgttaaaaaacccattcctgaaagtgtttttgttcagattctggagaagctgtatgaagaagatattggcgtagggatgtacgctctttatccgtacggcggcataatggatgagattagtgaaagcgccatccctttcccccacagagctggtatcctgtacgagttgtggtatatctgctcctgggagaaacaggaggataacgaaaagcacttaaattggattaggaatatctacaatttcatgacgccctacgtttccaagaaccccaggttggcctatttgaactacagggatcttgatattggaatcaacgaccccaaaaacccaaacaactacacccaggcaaggatttggggagagaagtacttcgggaagaacttcgacaggctagttaaggtgaaaacgctagttgatccaaataattttttcagaaacgaacagagtatccctcccttaccgcgtcataggcac

SEQ ID NO: 62 - DNA, 1548 bp, Artificial Sequence
  Synthetic
aatccaagagaaaatttcttgaagtgtttttctcagtatatcccgaataatgcgacgaaccttaagttagtatacactcagaacaaccctctatatatgagcgttctaaattctacaatccacaacctaagatttacgtccgacacgactccgaaacccctagttatagtgacaccgtcacatgttagccatatacagggcaccatactatgttccaaaaaagttgggttacaaatacgtacccgtagcgggggacacgacagtgaggggatgagttatattagtcaggtgcctttcgtcatagtggatttaagaaatatgaggtcaattaaaatcgacgttcactcacaaactgcctgggttgaggcgggggccacattgggtgaagtatattactgggtcaatgagaagaacgagaatctttcactagcagccggttattgtcccacagtctgcgccggcggtcactttggcggcggcggatacggtcccttaatgagaaattacgggcttgccgcagacaatatcatagatgctcacttagttaatgttcatggaaaagtgttagaccgtaaaagcatgggggaggatctgttttgggcgcttagagggggaggggcagaatcatttggaataatagtggcatggaaaatcaggcttgtggctgttccaaagagtaccatgttctcagtaaagaaaataatggagatccatgagctagttaaacttgtgaataaatggcaaaacatagcctataaatatgataaggacttgctgcttatgactcatttcataaccagaaacattacggataaccaagggaagaacaaaacagccatccatacctactttagctccgttttcttgggtggtgtagacagcttagttgacctgatgaacaagagttttccggaactaggtatcaagaagacagattgtagacaactttcctggattgataccataatcttttacagcggagtcgtcaattatgacactgacaacttcaacaaggaaattttattagataggagtgcgggtcaaaattctgccttcaagatcaaactagactacgttaaaaaacccattcctgaaagtgtttttgttcagattctggagaagctgtatgaagaagatattggcgcggggatgtacgctctttatccgtacggcggcataatggatgagattagtgaaagcgccatccctttcccccacagagctggtatcctgtacgagttgtggtatatctgctcctgggagaaacaggaggataacgaaaagcacttaaattggattaggaatatctacaatttcatgacgccctacgtttccaagaaccccaggttggcctatttgaactacagggatcttgatattggaatcaacgaccccaaaaacccaaacaactacacccaggcaaggatttggggagagaagtacttcgggaagaacttcgacaggctagttaaggtgaaaacgctagttgatccaaataattttttcagaaacgaacagagtatccctcccttaccgcgtcataggcac

SEQ ID NO: 63 - DNA, 1551 bp, Artificial Sequence
  Synthetic
aaccccagggaaaatttcttaaaatgcttttctaagcatatccctaataacgtcgcgaatccgaaattggtttatacccaacacgatcagctgtacatgtccctccttaatagcactattcaaaacctacgctttatatcagacacgactccaaagcctttggtaattgtgacaccatcgaacaattcacatatccaggccacaattttatgttctaaaaaggttggcttgcaaatacgtaccagaagtggaggtcacgatgcagagggtatgtcttatatctcacaagtgccattcgttgtcgtagatcttagaaatatgcatagtattaaaatagacgttcattcccaaactgcttgggtagaagctggggcaacattaggtgaagtgtactattggatcaatgaaaagaatgagaacctgtcttttcccggaggctactgtcctacagtcggtgttggtggacacttctcgggtgggggctatggagccctaatgagaaactacggtctagcagctgataatattattgacgctcatttggttaacgtagatggcaaagttttggaccgaaaatcgatgggagaggatttattttgggccatcaggggtgggggtggagaaaattttgggataattgcagcgtggaagataaaattagttgctgtcccaagtaaatctaccatcttttccgtaaagaagaatatggaaattcacggtttggtgaaacttttcaacaaatggcaaaacatagcctataagtatgataaagacttagtcttaatgactcatttcattactaaaaatattacggataatcacggcaaaaataagacgaccgttcatggttacttttcaagcatttttcatggcggtgttgattcactggtcgatctcatgaataagagctttcctgagttaggcattaaaaaaactgactgtaaggaatttagttggatcgacacgacaatattctactctggggtggtaaactttaatacagctaacttcaaaaaggaaattcttttagatagatcagctggtaaaaagactgcatttagtattaaactggattatgtgaaaaaaccgataccagaaacagctatggtaaagatcttagaaaagttgtatgaagaggatgtcggtgcgggtatgtacgttctgtatccatacggaggtataatggaggaaatctcagaatctgcgattcctttcccacatcgtgctggtattatgtatgaaatttggtatatagcatcttgggagaaacaggaagataatgagaaacacataaactggatcagaaatgtttacaactttactaccccctatgtctcccaaaatcctcggatggcctacctgaattatcgagatttggacctaggtaagactaactttgagagtcccaataactatactcaggcaagaatatggggtgaaaaatatttcggcaagaattttaataggctcgtgaaggttaagacgaaagttgaccctgataactttttccgcaatgaacaaagtattccaccattgccccttagacatcac

SEQ ID NO: 64 - DNA, 1551 bp, Artificial Sequence
  Synthetic
aaccctcaggaaaatttcctgaagtgtttttctcaatatattccaactaatgtgacaaacgccaaactcgtttacacgcaacacgatcaattttatatgtccatacttaatagtaccatccagaacttgagattcacttcggacacaacaccgaaacccctagtcattataactcctttaaatgtaagccatattcaaggtaccatcctatgctcaaagaaagttgggttacagattaggactcgttcaggaggtcatgatgctgagggcatgtcttacatcagtcaagtcccatttgttgtagtggatttgcgaaatatgcattctataaaaattgacgttcacagtcaaacggcgtgggtagaagcaggagctacattaggtgaggtttattactggataaatgaaaagaacgaaaacttgagctttccaggcggatattgtcctactgtaggtgtgggcggacatttctctggtggtgggtacggtgcattgatgagaaattatggcttagccgctgataatattattgatgcacacctggtcaatgttgacgggaaagttcttgacagaaagtccatgggggaggatctcttctgggctatccgcggtggtggaggtgaaaattttggtattatcgcagcctggaaaattaaactggtcgctgtcccatcaaagtcgaccatattttctgttaagaaaaacatggaaattcatggattggttaagctatttaataaatggcagaacattgcatataagtatgataaagacttagtgctaatgacccatttcataactaaaaacatcacagataaccacggtaagaataaaacaaccgtgcatggctacttttcctcaatattccatggaggcgtagatagtctggtagatcttatgaataagtcttttcccgagcttgggatcaagaaaaccgactgcaaggaattttcctggattgatactacgattttctactcaggtgtagtcaatttcaacacggccaattttaaaaaagaaatactgttggacaggtcggcgggaaagaaaaccgcttttagcatcaagttagactatgttaaaaaaccgataccagaaactgccatggttaaaatattggagaaattatatgaagaggatgtgggcgcaggtatgtatgtgctatacccttacggtggaattatggaagaaatttccgaaagtgctattccgtttcctcatagagctggaataatgtatgaattgtggtacactgcgtcatgggaaaaacaagaagataacgagaagcacattaattgggtaaggagcgtttataattttacaacgccttacgtcagtcaaaacccaaggctggcatatttaaattatcgggatttagacctcggcaaaacaaatcacgcctctccaaacaattacacacaagcgagaatatggggtgaaaagtattttggaaagaatttcaaccgtctagttaaagtcaagactaaggttgatcctaataacttcttcagaaacgaacagagcatccccccattgcctttacgtcaccat

SEQ ID NO: 65 - DNA, 1548 bp, Artificial Sequence
  Synthetic
aatccaagagaaaatttcttgaagtgtttttctcagtatatcccgaataatgcgacgaaccttaagttagtatacactcagaacaaccctctatatatgagcgttctaaattctacaatccacaacctaagatttacgtccgacacgactccgaaacccctagttatagtgacaccgtcacatgttagccatatacagggcaccatactatgttccaaaaaagttgggttacaaatacgtacccgtagcgggggacacgacagtgaggggatgagttatattagtcaggtgcctttcgtcatagtggatttaagaaatatgaggtcaattaaaatcgacgttcactcacaaactgcctgggttgaggcgggggccacattgggtgaagtatattactgggtcaatgagaagaacgagaatctttcactagcagccggttattgtcccacagtctgcgccggcggtcactttggcggcggcggatacggtcccttaatgagaaattacgggcttgccgcagacaatatcatagatgctcacttagttaatgttaacggaaaagtgttagaccgtaaaagcatgggggaggatctgttttgggcgcttagagggggaggggcagaatcatttggaataatagtggcatggaaaatcaggcttgtggctgttccaaagagtaccatgttctcagtaaagaaaataatggagatccatgagctagttaaacttgtgaataaatggcaaaacatagcctataaatatgataaggacttgctgcttatgactcatttcataaccagaaacattacggataaccaagggaagaacaaaacagccatccatacctactttagctccgttttcttgggtggtgtagacagcttagttgacctgatgaacaagagttttccggaactaggtatcaagaagacagattgtagacaactttcctggattgataccataatcttttacagcggagtcgtcaattatgacactgacaacttcaacaaggaaattttattagataggagtgcgggtcaaaatggggccttcaagatcaaactagactacgttaaaaaacccattcctgaaagtgtttttgttcagattctggagaagctgtatgaagaagatattggcgcggggatgtacgctctttatccgtacggcggcataatggatgagattagtgaaagcgccatccctttcccccacagagctggtatcctgtacgagttgtggtatatctgctcctgggagaaacaggaggataacgaaaagcacttaaattggattaggaatatctacaatttcatgacgccctacgtttccaagaaccccaggttggcctatttgaactacagggatcttgatattggaatcaacgaccccaaaaacccaaacaactacacccaggcaaggatttggggagagaagtacttcgggaagaacttcgacaggctagttaaggtgaaaacgctagttgatccaaataattttttcagaaacgaacagagtatccctcccttaccgcgtcataggcac

SEQ ID NO: 66 - DNA, 1554 bp, Artificial Sequence
  Synthetic
gctaacccgagagagaatttcttgaaatgtttttcaaagcatataccaaataacgtggccaatcccaaacttgtctatactcaacacgatcagctatacatgtccattctcaactcgaccatccaaaatttacgttttatttctgacacgacacctaagcctttagtaatagttactccatctaataacagccatattcaggcaacaatcttgtgcagtaaaaaggttggcctgcaaatcaggactcgctcaggagggcacgatgcggaaggtatgagttatatttctcaagtcccattcgtagttgtggatttaagaaatatgcattcaataaaaattgacgttcattctcaaaccgcttgggtagaagcaggagccacattgggtgaggtctactattggataaacgaaaagaatgaaaatctgtcattccctggtggctactgtcccacggtgggtgttggaggtcacttttccggtggaggttatggcgctctaatgagaaactacgggttagccgctgataacatcatcgacgcgcatcttgtaaatgttgatggcaaagttttagatagaaaaagcatgggtgaagatttgttttgggcaattcgaggagggggaggtgagaacttcggcattatagcagcttggaagattaaattggtcgcagtgccaagtaaatcgaccattttttctgtaaagaaaaatatggaaattcacggtttggtcaagctatttaataaatggcagaatatcgcatataagtatgacaaagaccttgttctcatgactcatttcataacaaaaaatattacagataaccacggtaaaaacaaaacgactgtgcatgggtacttttcttcaatatttcatggtggagttgattcgcttgttgatttgatgaacaagtccttccctgaactgggcataaagaaaacggactgcaaggaatttagctggattgatacaactatcttctactcaggagtggtcaattttaacactgctaatttcaagaaagagatccttttagacaggtctgctggtaaaaagaccgccttttccataaagttggattatgtaaagaaaccaatcccggaaactgctatggtgaagattttagaaaaactctatgaggaggatgtaggtgcgggcatgtatgtcctctacccttacggcgggattatggataaaatttccgaaagtacaataccatttccccatcgtgctggtataatgtacgaagtttggtatatatgttcgtgggaaaagcaagaggacaatgaaaaacacttaaattggatcagaaacatatacaattttatgacaccttatgtgtcgaaaaatcccaggctggcctatcttaattaccgggacttagatattggtattaacgacccaaaaaacccaaataactatacacaagcgagaatttggggagaaaagtattttggcaaaaacttcgatcgattggttaaagtaaagaccctagttgatcctaacaattttttcagaaatgaacagagcatccctcccttaccaagacacaggcat

SEQ ID NO: 67 - DNA, 1551 bp, Artificial Sequence
  Synthetic
aatcctcgagagaactttctgaagtgtttcagcaaacacataccaaataatgtagctaacccgaaattggtttacacacagcatgatcaactatatatgagtatcttaaattctacgattcaaaacttgaggtttatttccgacaccactccaaagcctcttgtcattgtgactccctcaaacaattcacatatccaagcgaccatattatgctctaaaaaagttggtttacagatcagaacacgttcgggagggcatgatgccgaaggtatgtcctatattagtcaagtgccattcgtagttgtcgatctcagaaacatgcacagcattaagatcgacgtccattctcaaactgcatgggttgaagccggcgcaacattgggtgaggtttactattggataaatgaaaaaaatgaaaacctctcgtttcccggaggctattgtcctacggtaggtgttgggggtcacttctcaggtggaggctacggcgctctaatgagaaattacggtcttgctgcggataatattatagacgcacatctagtgaacgtcgatggcaaggtgttagatcgcaaatctatgggggaagatttgttttgggctatcaggggtggtggaggtgagaatttcggcattattgcagcatggaagattaaactggtcgccgttccaagtaagtctactatattttccgtaaaaaaaaatatggaaattcatggactggtaaagttgtttaacaaatggcagaacatcgcttataaatatgataaggacttagttttgatgacccacttcattacaaagaacataactgataatcatggtaaaaataaaaccactgtacacggttacttttcctcaatttttcatggaggagtggattcacttgttgacctgatgaacaagagtttcccagaattgggcatcaaaaaaacagactgcaaggaattttcttggatagataccacaatcttctactcaggtgtcgtgaattttaacactgctaattttaaaaaggagattttactagatagatccgcggggaagaaaacagcattttcaataaagcttgattatgtaaaaaaacccattccggaaaccgctatggttaaaatattagagaagttatatgaagaagatgtcggtgccggaatgtacgttctctatccttatggcgggatcatggaggaaatatcggagagcgctattccattcccccaccgtgccggtattatgtacgaactatggtacacagcatcttgggaaaaacaagaggataatgaaaaacatattaattgggtgcggtctgtttataattttacgaccccatatgtgtcacaaaacccaaggttagcctacttgaattatagagacttggacctaggcaagacgaaccacgcttctcctaataattatactcaggctcgtatatggggtgaaaagtacttcggtaagaacttcaatagactggtgaaggtgaaaactaaagttgacccaaacaatttctttagaaatgaacagtcaatcccccctcttcctcctcatcatcat

SEQ ID NO: 68 - DNA, 1554 bp, Artificial Sequence
  Synthetic
gcaaatccacaggagaacttccttaaatgtttttctcaatacatcccgacgaatgtaacaaacgcgaagttggtctatactcaacacgatcaattttatatgtcgattctaaattccaccatacagaacctccgcttcacttcagacacaactcccaaacctttagtgattatcaccccactgaatgttagccatattcaagggacaattttatgctccaagaaagttggtttgcagatacgtacgagaagtggaggtcatgatgccgaaggtatgagctacatctctcaagtgccttttgttgtagtcgaccttagaaatatgcacagtataaagatcgatgttcattcacaaactgcttgggtagaagctggcgccaccctaggagaagtctattactggattaacgagaataacgaaaatctctcgtttcccgcaggctattgtccaacagttggtgcaggcgggcacttctctggtgggggatacggtgctctgatgcggaactatggtttggccgcggataatattatcgatgcacagttagtaaatgtggacggcaaagttttagataggaaatccatgggtgaagatctattctgggcgattaggggaggaggtggtgagaactttggtataatagctgcctggaaaattcgattggtcgctgttccttcaatgtctactattttttcagtaaaaaagaatatggaaatacatgaacttgtgaagttagtcaataagtggcaaaacatcgcatatatgtatgagaaggaactcttgttgtttactcattttataacaagaaatattacagacaaccagggaaaaaacaaaactacaatccatagttacttctcgtctatttttcacggtggggtcgatagtttagttgacctgatgaataagagctttccagaattggggataaaaaagaccgattgcaaacaactgtcttggatagacacaattattttctattcaggcctagtgaattacaatactacaaactttaagaaagaaatattattggatagaagtggcggcagaaaagctgcgttcagtattaagcttgactacgttaaaaaaccaatcccggagtctgttttcgtgcaaatcttagagaaactatatgaagaagatattggtgctggtatgtacgctctgtatccttacggtggaattatggatgagatctccgaatcagccattccattcccgcaccgtgccggtatactatatgaattgtggtatatttgtagttgggagaaacaagaagataacgagaaacatcttaattggattaggaatatatataactttatgacgccttacgtttcaaaaaatcctcgcttagcatatttgaattacagagatctcgacatcggtataaatgatccaaaaaaccccaataactacactcaagcacgaatctggggagaaaagtactttgggaaaaatttcgacagattagtaaaggtaaaaaccctagtggatcccaataacttttttagaaatgaacaaagcataccacccttgccacgtcatagacac

SEQ ID NO: 69 - DNA, 1548 bp, Artificial Sequence
  Synthetic
aatccaagagaaaatttcttgaagtgtttttctcagtatatcccgaataatgcgacgaaccttaagttagtatacactcagaacaaccctctatatatgagcgttctaaattctacaatccacaacctaagatttacgtccgacacgactccgaaacccctagttatagtgacaccgtcacatgttagccatatacagggcaccatactatgttccaaaaaagttgggttacaaatacgtacccgtagcgggggacacgacagtgaggggatgagttatattagtcaggtgcctttcgtcatagtggatttaagaaatatgaggtcaattaaaatcgacgttcactcacaaactgcctgggttgaggcgggggccacattgggtgaagtatattactgggtcaatgagaagaacgagaatctttcactagcagccggttattgtcccacagtctgcgccggcggtcactttggcggcggcggatacggtcccttaatgagaaattacgggcttgccgcagacaatatcatagatgctcacttagttaatgttcatggaaaagtgttagaccgtaaaagcatgggggaggatctgttttgggcgcttagagggggaggggcagaatcatttggaataatagtggcatggaaaatcaggcttgtggctgttccaaagagtaccatgttctcagtaaagaaaataatggagatccatgagctagttaaacttgtgaataaatggcaaaacatagcctataaatatgataaggacttgctgcttatgactcatttcataaccagaaacattacggataaccaagggaagaacaaaacagccatccatacctactttagctccgttttcttgggtggtgtagacagcttagttgacctgatgaacaagagttttccggaactaggtatcaagaagacagattgtagacaactttcctggattgataccataatcttttacagcggagtcgtcaattatgacactgacaacttcaacaaggaaattttattagataggagtgcgggtcaaaatactgccttcaagatcaaactagactacgttaaaaaacccattcctgaaagtgtttttgttcagattctggagaagctgtatgaagaagatattggcgcggggatgtacgctctttatccgtacggcggcataatggatgagattagtgaaagcgccatccctttcccccacagagctggtatcctgtacgagttgtggtatatctgctcctgggagaaacaggaggataacgaaaagcacttaaattggattaggaatatctacaatttcatgacgccctacgtttccaagaaccccaggttggcctatttgaactacagggatcttgatattggaatcaacgaccccaaaaacccaaacaactacacccaggcaaggatttggggagagaagtacttcgggaagaacttcgacaggctagttaaggtgaaaacgctagttgatccaaataattttttcagaaacgaacagagtatccctcccttaccgcgtcataggcac

SEQ ID NO: 70 - DNA, 1554 bp, Artificial Sequence
  Synthetic
gcaaaccctcgtgaaaattttttaaaatgcttctctaagcatatacccaataacgttgctaatccgaaacttgtctatacacagcacgatcaactatacatgagtatcttgaactcaactattcaaaatttaaggtttatttccgacaccacgccaaagccactcgtaatcgttacacctagcaataattcgcatatacaggccactattctgtgttctaaaaaggtgggtctgcaaataagaactagatccgggggacacgatgcggagggtatgtcatatatttctcaagtgcccttcgtagttgttgacttgcgcaacatgcattctatcaaaatagatgtccatagccaaaccgcttgggtcgaagcaggcgccacattgggtgaagtttactattggattaatgaaaaaaatgagaacttaagttttccaggaggctactgtcctactgtgggtgtaggaggccatttttcagggggtggttatggtgctctaatgcgaaattacggactagccgcagataatatcattgatgctcacttagtaaacgtagacggcaaggtgttggacagaaagagtatgggggaggatcttttctgggcaataaggggtggcggtggcgaaaactttggaattattgccgcttggaaaattaaactcgttgcagttccatcaaaaagtacaatcttttctgtcaaaaagaatatggaaatacatgggcttgttaagttgttcaacaaatggcaaaacatcgcctataaatatgataaagatttagtcttaatgacgcatttcatcacaaagaacattaccgataatcacggaaaaaataagactacagttcacggttacttctcctccatttttcatggtggtgtggactcccttgtcgacctcatgaataagtcatttccagagttgggtataaagaaaacagattgcaaagaattttcgtggattgatacgactatcttctatagcggagtagtaaattttaacaccgctaattttaaaaaagaaattctattagacagatctgctggaaaaaagaccgctttttcgataaagttggattacgtgaagaaacctataccagagactgcgatggtcaaaatcttagaaaaattatatgaagaagatgttggtgcgggaatgtatgtactatacccttacgggggcataatggataagatttctgaatccaccattcctttcccccatcgggcaggaatcatgtatgaagtttggtatatttgtagttgggaaaaacaggaagataatgagaagcatcttaattggattagaaacatttataatttcatgaccccatacgtttctaaaaacccgcgtttggcttacttaaattatagagacttagacatcggtataaacgacccgaagaatcccaataattacactcaagctaggatttggggtgagaaatactttggtaagaactttgatcgacttgtgaaggtgaaaactctggtggatccaaacaacttcttccgtaatgagcaatctattccacccctccccagacaccgtcac

SEQ ID NO: 71 - DNA, 1554 bp, Artificial Sequence
  Synthetic
gcgaatccgcgtgagaactttctaaagtgcttctcaaaacatattcctaataacgtggcaaatcccaaacttgtttacactcagcacgatcaattatatatgtctttgctgaacagcacgatacaaaatttgcgctttatcagtgacaccacaccaaagccattagtaattgtcactccttccaacaatagccatatccaggctacaattctctgttctaaaaaggttggtttacaaataagaacaaggtcaggagggcacgatgccgaaggtatgtcctatatttcgcaagtaccattcgttgtcgtggacttgagaaatatgcatagtataaaaatcgatgttcattctcaaactgcttgggtcgaagcaggcgccaccctaggtgaagtatactattggattaacgagaataacgaaaatttatcatttcccgctggatattgtcccactgttggcgcaggagggcacttctcgggtggtggatacggtgctctaatgagaaattatggcttggccgcagataacattatcgatgctcagctggttaacgtagacggtaaagtccttgaccggaagtccatgggtgaagatctgttttgggcaatcagagggggtggtggggagaattttggcataattgccgcttggaaaatacgtcttgtggccgtcccatctatgtcgacgatcttttccgttaagaagaatatggaaattcatgagttggttaaattagtgaacaagtggcaaaacatagcatacatgtatgaaaaagaacttctcctatttactcatttcatcaccaggaatattacagataatcaaggtaaaaacaaaacaacgattcactcttacttctcttctatatttcacggcggcgtagatagtttagttgatttaatgaataaatcattccctgaactcggaattaagaaaactgattgcaagcagttgagttggattgacacaataatcttttatagcggattggtgaattacaatacgaccaatttcaaaaaagagattctgcttgacagatctggtggccgaaaggcggcgttcagtattaagctggattatgtaaaaaaaccgatacctgaaagcgtgtttgtgcaaatattagaaaagctatatgaagaggatattggggctggcatgtacgccttgtatccttatggtggtatcatggatgaaatcagtgaatcagctattccatttccacatagagctggaattttatacgaattatggtacatttgtagctgggaaaaacaagaggataatgaaaagcatctaaactggataaggaatatctataactttatgacaccgtacgtttcaaagaatccaagattggcttacttaaactacagagacttggacataggaatcaatgatccaaaaaatcccaataattatacccaggcacggatttggggtgagaaatacttcggaaaaaacttcgatcgattagtcaaggttaaaactcttgtcgacccgaacaacttttttagaaatgaacagtcaattcctcctttgccacgacatagacac

SEQ ID NO: 72 - DNA, 1548 bp, Artificial Sequence
  Synthetic
aatccaagagaaaatttcttgaagtgtttttctcagtatatcccgaataatgcgacgaaccttaagttagtatacactcagaacaaccctctatatatgagcgttctaaattctacaatccacaacctaagatttacgtccgacacgactccgaaacccctagttatagtgacaccgtcacatgttagccatatacagggcaccatactatgttccaaaaaagttgggttacaaatacgtacccgtagcgggggacacgacagtgaggggatgagttatattagtcaggtgcctttcgtcatagtggatttaagaaatatgaggtcaattaaaatcgacgttcactcacaaactgcctgggttgaggcgggggccacattgggtgaagtatattactgggtcaatgagaagaacgagaatctttcactagcagccggttattgtcccacagtctgcgccggcggtcactttggcggcggcggatacggtcccttaatgagaaattacgggcttgccgcagacaatatcatagatgctcacttagttaatgttcatggaaaagtgttagaccgtaaaagcatgggggaggatctgttttgggcgcttagagggggaggggcagaatcatttggaataatagtggcatggaaaatcaggcttgtggctgttccaaagagtaccatgttctcagtaaagaaaataatggagatccatgagctagttaaacttgtgaataaatggcaaaacatagcctataaatatgataaggacttgctgcttatgactcatttcataaccagaaacattacggataaccaagggaagaacaaaacagccatccatacctactttagctccgttttcttgggtggtgtagacagcttagttgacctgatgaacaagagttttccggaactaggtatcaagaaggaagattgtagacaactttcctggattgataccataatcttttacagcggagtcgtcaattatgacactgacaacttcaacaaggaaattttattagataggagtgcgggtcaaaatggggccttcaagatcaaactagactacgttaaaaaacccattcctgaaagtgtttttgttcagattctggagaagctgtatgaagaagatattggcgcggggatgtacgctctttatccgtacggcggcataatggatgagattagtgaaagcgccatccctttcccccacagagctggtatcctgtacgagttgtggtatatctgctcctgggagaaacaggaggataacgaaaagcacttaaattggattaggaatatctacaatttcatgacgccctacgtttccaagaaccccaggttggcctatttgaactacagggatcttgatattggaatcaacgaccccaaaaacccaaacaactacacccaggcaaggatttggggagagaagtacttcgggaagaacttcgacaggctagttaaggtgaaaacgctagttgatccaaataattttttcagaaacgaacagagtatccctcccttaccgcgtcataggcac

SEQ ID NO: 73 - DNA, 1551 bp, Artificial Sequence
  Synthetic
aacccgcaggaaaatttcctaaagtgttttagtcaatacataccaaataacgtcgctaatcccaaacttgtgtatacccaacatgaccaactgtatatgtctatcttaaattcaactattcagaacttgcgatttacgagcgatacaactcctaaaccactcgttattgtaacaccttccaatgtttctcacatccaagccacaattttgtgctcgaagaaagtaggtttacaaatacgtactaggtcaggagggcatgatgcggagggtatgagttacattagccaggttccattcgtgattgtcgaccttagaaatatgcactccataaagatcgatgttcattcgcaaaccgcatgggtagaagctggcgccacgttgggtgaagtgtattactggatcaacgagaaaaacgaaaatttatcctttcctggaggctattgtccaactgttggtgtcggaggtcatttttctggaggtggttatggggcactaatgcgcaattacggcttagctgccgataacattatagatgcacatctggtaaatgttgacggtaaagtcctggacagaaagtcgatgggagaagatctcttctgggcaataagagggggcggaggtgagaattttggcattattgctgcttggaaaataaagttagtggcggttccgtcaaagagcacaatcttttctgtaaaaaagaacatggaaatacacggtttagttaaattgttcaataaatggcagaatattgcctataagtacgataaagacctgttacttatgacccacttcattacacggaatatcactgataaccatggtaaaaataagactacagtgcacggctacttcagtagtatctttcatggaggggttgatagcttggtagatctcatgaataaatcatttcccgaactaggtattaagaaaaccgactgtaaagagttgtcttggatagatacaactatattttattcaggtgtagttaactataacacagctaacttcaaaaaagaaattctattggaccgttctgcggggaagaaaacggcattttctataaaactagattatgtcaaaaaacctatcccagaaacggctatggttaagattttggaaaagttgtacgaagaagatgtcggcgtaggtatgtatgtcttatacccgtacggtggaattatggatgaaatcagtgagtcagctattccattcccacatagggcggggatcatgtatgaactctggtacactgcatcgtgggagaagcaagaagataatgaaaagcatattaattgggtgagatctgtatataacttcaccacaccttatgtgtcccaaaatcctagactagcatatttgaattatagggacttggacctgggtaaaactaacccagagtcccccaacaattacactcaagcgagaatatggggagaaaaatactttggcaagaattttaacagattagttaaagtcaagacgaaggttgatcccaataatttctttcgcaacgagcagtcgatacctcccctcccacctcaccatcat

SEQ ID NO: 74 - DNA, 1548 bp, Artificial Sequence
  Synthetic
aatccaagagaaaatttcttgaagtgtttttctcagtatatcccgaataatgcgacgaaccttaagttagtatacactcagaacaaccctctatatatgagcgttctaaattctacaatccacaacctaagatttacgtccgacacgactccgaaacccctagttatagtgacaccgtcacatgttagccatatacagggcaccatactatgttccaaaaaagttgggttacaaatacgtacccgtagcgggggacacgacagtgaggggatgagttatattagtcaggtgcctttcgtcatagtggatttaagaaatatgaggtcaattaaaatcgacgttcactcacaaactgcctgggttgaggcgggggccacattgggtgaagtatattactgggtcaatgagaagaacgagaatctttcactagcagccggttattgtcccacagtctgcgccggcggtcactttggcggcggcggatacggtcccttaatgagaaattacgggcttgccgcagacaatatcatagatgctcacttagttaatgttcatggaaaagtgttagaccgtaaaagcatgggggaggatctgttttgggcgcttagagggggaggggcagaatcatttggaataatagtggcatggaaaatcaggcttgtggctgttccaaagagtaccatgttctcagtaaagaaaataatggagatccatgagctagttaaacttgtgaataaatggcaaaacatagcctataaatatgataaggacttgctgcttatgactcatttcataaccagaaacattacggataaccaagggaagaacaaaacagccatccatacctactttagctccgttttcttgggtgatgtagacagcttagttgacctgatgaacaagagttttccggaactaggtatcaagaagacagattgtagacaactttcctggattgataccataatcttttacagcggagtcgtcaattatgacactgacaacttcaacaaggaaattttattagataggagtgcgggtcaaaatggggccttcaagatcaaactagactacgttaaaaaacccattcctgaaagtgtttttgttcagattctggagaagctgtatgaagaagatattggcgcggggatgtacgctctttatccgtacggcggcataatggatgagattagtgaaagcgccatccctttcccccacagagctggtatcctgtacgagttgtggtatatctgctcctgggagaaacaggaggataacgaaaagcacttaaattggattaggaatatctacaatttcatgacgccctacgtttccaagaaccccaggttggcctatttgaactacagggatcttgatattggaatcaacgaccccaaaaacccaaacaactacacccaggcaaggatttggggagagaagtacttcgggaagaacttcgacaggctagttaaggtgaaaacgctagttgatccaaataattttttcagaaacgaacagagtatccctcccttaccgcgtcataggcac

SEQ ID NO: 75 - DNA, 1548 bp, Artificial Sequence
  Synthetic
aatccaagagaaaatttcttgaagtgtttttctcagtatatcccgaataatgcgacgaaccttaagttagtatacactcagaacaaccctctatatatgagcgttctaaattctacaatccacaacctaagatttacgtccgacacgactccgaaacccctagttatagtgacaccgtcagatgttagccatatacagggcaccatactatgttccaaaaaagttgggttacaaatacgtacccgtagcgggggacacgacagtgaggggatgagttatattagtcaggtgcctttcgtcatagtggatttaagaaatatgaggtcaattaaaatcgacgttcactcacaaactgcctgggttgaggcgggggccacattgggtgaagtatattactgggtcaatgagaagaacgagaatctttcactagcagccggttattgtcccacagtctgcgccggcggtcactttggcggcggcggatacggtcccttaatgagaaattacgggcttgccgcagacaatatcatagatgctcacttagttaatgttcatggaaaagtgttagaccgtaaaagcatgggggaggatctgttttgggcgcttagagggggaggggcagaatcatttggaataatagtggcatggaaaatcaggcttgtggctgttccaaagagtaccatgttctcagtaaagaaaataatggagatccatgagctagttaaacttgtgaataaatggcaaaacatagcctataaatatgataaggacttgctgcttatgactcatttcataaccagaaacattacggataaccaagggaagaacaaaacagccatccatacctactttagctccgttttcttgggtggtgtagacagcttagttgacctgatgaacaagagttttccggaactaggtatcaagaagacagattgtagacaactttcctggattgataccataatcttttacagcggagtcgtcaattatgacactgacaacttcaacaaggaaattttattagataggagtgcgggtcaaaatggggccttcaagatcaaactagactacgttaaaaaacccattcctgaaagtgtttttgttcagattctggagaagctgtatgaagaagatattggcgcggggatgtacgctctttatccgtacggcggcataatggatgagattagtgaaagcgccatccctttcccccacagagctggtatcctgtacgagttgtggtatatctgctcctgggagaaacaggaggataacgaaaagcacttaaattggattaggaatatctacaatttcatgacgccctacgtttccaagaaccccaggttggcctatttgaactacagggatcttgatattggaatcaacgaccccaaaaacccaaacaactacacccaggcaaggatttggggagagaagtacttcgggaagaacttcgacaggctagttaaggtgaaaacgctagttgatccaaataattttttcagaaacgaacagagtatccctcccttaccgcgtcataggcac

SEQ ID NO: 76 - DNA, 1554 bp, Artificial Sequence
  Synthetic
gctaatccgcgtgagaacttccttaaatgcttttcgaagcatataccaaataacgttgcaaatcccaaattagtgtacacgcagcacgatcaactctatatgtccctgctaaactctactattcaaaatttacgctttatcagtgacaccacacctaagcctttggtaattgtcacaccaagcaataactcccatatacaagccactatcttgtgttcaaaaaaggttggcttgcagattagaaccaggtcaggagggcatgatgcggaaggtatgtcgtatatttctcaagtcccattcgttgtggttgacttacgaaatatgcactctatcaaaatagatgtacacagtcaaactgcttgggtcgaagcaggagctacactgggtgaagtgtactattggattaatgaaaacaatgagaacctaagttttcccgcgggttactgtcctacggttggcgccggtgggcatttctcaggaggcggttatggtgcattaatgagaaattacggccttgctgccgataacattatcgacgcgcagttggtaaacgtagatgggaaagtcttagatagaaagagcatgggtgaggatcttttttgggctattcggggtggagggggtgaaaattttggtataatagcagcttggaagataagactcgttgcggtgccatccatgtcaacaatcttctctgttaaaaaaaatatggaaattcatgaattggtcaaattagttaataagtggcaaaacattgcatatatgtatgaaaaagaacttctcttattcactcactttattaccaggaatataaccgacaatcaggggaagaacaaaactacaatacatagctatttttcgtctatttttcatggcggagtagattcattggtggatctaatgaataaatcttttcctgagctaggtatcaagaaaactgattgcaagcaattgagttggattgacacaataattttttacagcggattagtcaactataatacaaccaatttcaaaaaggaaatccttcttgacagatcaggcggacgtaaggccgctttctcaatcaaactagattatgttaaaaagccaatacctgaatcagtatttgttcagatcctggagaagttgtacgaggaagatattggtgccggtatgtatgcattatacccatacggtggcattatggatgagatctccgaatccgctattcctttcccccacagagccgggattttgtatgaactatggtacatatgtagttgggaaaaacaagaggataacgagaaacatttaaactggataaggaacatttataactttatgactccatacgtttcgaaaaatccccgtctggcttatttaaattatagagatctggacattggaatcaacgatccgaaaaatccaaataactacacgcaagcacgcatttggggtgaaaaatattttgggaaaaatttcgacagattggtaaaggtaaagacgttagttgaccccaataatttctttcgaaacgaacagtctatcccgcctttgccaagacatcggcac

SEQ ID NO: 77 - DNA, 1548 bp, Artificial Sequence
  Synthetic
aatccaagagaaaatttcttgaagtgtttttctcagtatatcccgaataatgcgacgaaccttaagttagtatacactcagaacaaccctctatatatgagcgttctaaattctacaatccacaacctaagatttacgtccgacacgactccgaaacccctagttatagtgacaccgtcagaggttagccatatacagggcaccatactatgttccaaaaaagttgggttacaaatacgtacccgtagcgggggacacgacagtgaggggatgagttatattagtcaggtgcctttcgtcatagtggatttaagaaatatgaggtcaattaaaatcgacgttcactcacaaactgcctgggttgaggcgggggccacattgggtgaagtatattactgggtcaatgagaagaacgagaatctttcactagcagccggttattgtcccacagtctgcgccggcggtcactttggcggcggcggatacggtcccttaatgagaaattacgggcttgccgcagacaatatcatagatgctcacttagttaatgttcatggaaaagtgttagaccgtaaaagcatgggggaggatctgttttgggcgcttagagggggaggggcagaatcatttggaataatagtggcatggaaaatcaggcttgtggctgttccaaagagtaccatgttctcagtaaagaaaataatggagatccatgagctagttaaacttgtgaataaatggcaaaacatagcctataaatatgataaggacttgctgcttatgactcatttcataaccagaaacattacggataaccaagggaagaacaaaacagccatccatacctactttagctccgttttcttgggtggtgtagacagcttagttgacctgatgaacaagagttttccggaactaggtatcaagaagacagattgtagacaactttcctggattgataccataatcttttacagcggagtcgtcaattatgacactgacaacttcaacaaggaaattttattagataggagtgcgggtcaaaatggggccttcaagatcaaactagactacgttaaaaaacccattcctgaaagtgtttttgttcagattctggagaagctgtatgaagaagatattggcgcggggatgtacgctctttatccgtacggcggcataatggatgagattagtgaaagcgccatccctttcccccacagagctggtatcctgtacgagttgtggtatatctgctcctgggagaaacaggaggataacgaaaagcacttaaattggattaggaatatctacaatttcatgacgccctacgtttccaagaaccccaggttggcctatttgaactacagggatcttgatattggaatcaacgaccccaaaaacccaaacaactacacccaggcaaggatttggggagagaagtacttcgggaagaacttcgacaggctagttaaggtgaaaacgctagttgatccaaataattttttcagaaacgaacagagtatccctcccttaccgcgtcataggcac

SEQ ID NO: 78 - DNA, 1548 bp, Artificial Sequence
  Synthetic
aatccaagagaaaatttcttgaagtgtttttctcagtatatcccgaataatgcgacgaaccttaagttagtatacactcagaacaaccctctatatatgagcgttctaaattctacaatccacaacctaagatttacgtccgacacgactccgaaacccctagttatagtgacaccgtcacatgttagccatatacagggcaccatactatgttccaaaaaagttgggttacaaatacgtacccgtagcgggggacacgacagtgaggggatgagttatattagtcaggtgcctttcgtcatagtggatttaagaaatatgaggtcaattaaaatcgacgttcactcacaaactgcctgggttgaggcgggggccacattgggtgaagtatattactgggtcaatgagaagaacgagaatctttcactagcagccggttattgtcccacagtctgcgccggcggtcactttggcggcggcggatacggtcccttaatgagaaattacgggcttgccgcagacaatatcatagatgctcacttagttaatgttcatggaaaagtgttagaccgtaaaagcatgggggaggatctgttttgggcgcttagagggggaggggcagaatcatttggaataatagtggcatggaaaatcaggcttgtggctgttccaaagagtaccatgttctcagtaaagaaaataatggagatccatgagctagttaaacttgtgaataaatggcaaaacatagcctataaatatgataaggacttgctgcttttcactcatttcataaccagaaacattacggataaccaagggaagaacaaaacagccatccatacctactttagctccgttttcttgggtggtgtagacagcttagttgacctgatgaacaagagttttccggaactaggtatcaagaagacagattgtagacaactttcctggattgataccataatcttttacagcggagtcgtcaattatgacactgacaacttcaacaaggaaattttattagataggagtgcgggtcaaaatggggccttcaagatcaaactagactacgttaaaaaacccattcctgaaagtgtttttgttcagattctggagaagctgtatgaagaagatattggcgcggggatgtacgctctttatccgtacggcggcataatggatgagattagtgaaagcgccatccctttcccccacagagctggtatcctgtacgagttgtggtatatctgctcctgggagaaacaggaggataacgaaaagcacttaaattggattaggaatatctacaatttcatgacgccctacgtttccaagaaccccaggttggcctatttgaactacagggatcttgatattggaatcaacgaccccaaaaacccaaacaactacacccaggcaaggatttggggagagaagtacttcgggaagaacttcgacaggctagttaaggtgaaaacgctagttgatccaaataattttttcagaaacgaacagagtatccctcccttaccgcgtcataggcac

SEQ ID NO: 79 - DNA, 1548 bp, Artificial Sequence
  Synthetic
aatccaagagaaaatttcttgaagtgtttttctcagtatatcccgaataatgcgacgaaccttaagttagtatacactcagaacaaccctctatatatgagcgttctaaattctacaatccacaacctaagatttacgtccgacacgactccgaaacccctagttatagtgacaccgtcacatgttagccatatacagggcaccatactatgttccaaaaaagttgggttacaaatacgtacccgtagcgggggacacgacagtgaggggatgagttatattagtcaggtgcctttcgtcatagtggatttaagaaatatgaggtcaattaaaatcgacgttcactcacaaactgcctgggttgaggcgggggccacattgggtgaagtatattactgggtcaatgagaagaacgagaatctttcactagcagccggttattgtcccacagtctgcgccggcggtcactttggcggcggcggatacggtcccttaatgagaaattacgggcttgccgcagacaatatcatagatgctcacttagttaatgttcatggaaaagtgttagaccgtaaaagcatgggggaggatctgttttgggcgcttagagggggaggggcagaatcatttggaataatagtggcatggaaaatcaggcttgtggctgttccaaagagtaccatgttctcagtaaagaaaataatggagatccatgagctagttaaacttgtgaataaatggcaaaacatagcctataaatatgataaggacttgctgcttatgactcatttcataaccagaaacattacggataaccaagggaagaacaaaacagccatccatacctactttagctccgttttcttgggtggtgtagacagcttagttgacctgatgaacaagagttttccggaactaggtatcaagaagacagattgtagacaactttcctggattgataccataatcttttacagcggagtcgtcaattatgacactgacaacttcaacaaggaaattttattagataggagtgcgggtcaaaatcgcgccttcaagatcaaactagactacgttaaaaaacccattcctgaaagtgtttttgttcagattctggagaagctgtatgaagaagatattggcgcggggatgtacgctctttatccgtacggcggcataatggatgagattagtgaaagcgccatccctttcccccacagagctggtatcctgtacgagttgtggtatatctgctcctgggagaaacaggaggataacgaaaagcacttaaattggattaggaatatctacaatttcatgacgccctacgtttccaagaaccccaggttggcctatttgaactacagggatcttgatattggaatcaacgaccccaaaaacccaaacaactacacccaggcaaggatttggggagagaagtacttcgggaagaacttcgacaggctagttaaggtgaaaacgctagttgatccaaataattttttcagaaacgaacagagtatccctcccttaccgcgtcataggcac

SEQ ID NO: 80 - DNA, 1548 bp, Artificial Sequence
  Synthetic
aatccaagagaaaatttcttgaagtgtttttctcagtatatcccgaataatgcgacgaaccttaagttagtatacactcagaacaaccctctatatatgagcgttctaaattctacaatccacaacctaagatttacgtccgacacgactccgaaacccctagttatagtgacaccgtcacaagttagccatatacagggcaccatactatgttccaaaaaagttgggttacaaatacgtacccgtagcgggggacacgacagtgaggggatgagttatattagtcaggtgcctttcgtcatagtggatttaagaaatatgaggtcaattaaaatcgacgttcactcacaaactgcctgggttgaggcgggggccacattgggtgaagtatattactgggtcaatgagaagaacgagaatctttcactagcagccggttattgtcccacagtctgcgccggcggtcactttggcggcggcggatacggtcccttaatgagaaattacgggcttgccgcagacaatatcatagatgctcacttagttaatgttcatggaaaagtgttagaccgtaaaagcatgggggaggatctgttttgggcgcttagagggggaggggcagaatcatttggaataatagtggcatggaaaatcaggcttgtggctgttccaaagagtaccatgttctcagtaaagaaaataatggagatccatgagctagttaaacttgtgaataaatggcaaaacatagcctataaatatgataaggacttgctgcttatgactcatttcataaccagaaacattacggataaccaagggaagaacaaaacagccatccatacctactttagctccgttttcttgggtggtgtagacagcttagttgacctgatgaacaagagttttccggaactaggtatcaagaagacagattgtagacaactttcctggattgataccataatcttttacagcggagtcgtcaattatgacactgacaacttcaacaaggaaattttattagataggagtgcgggtcaaaatggggccttcaagatcaaactagactacgttaaaaaacccattcctgaaagtgtttttgttcagattctggagaagctgtatgaagaagatattggcgcggggatgtacgctctttatccgtacggcggcataatggatgagattagtgaaagcgccatccctttcccccacagagctggtatcctgtacgagttgtggtatatctgctcctgggagaaacaggaggataacgaaaagcacttaaattggattaggaatatctacaatttcatgacgccctacgtttccaagaaccccaggttggcctatttgaactacagggatcttgatattggaatcaacgaccccaaaaacccaaacaactacacccaggcaaggatttggggagagaagtacttcgggaagaacttcgacaggctagttaaggtgaaaacgctagttgatccaaataattttttcagaaacgaacagagtatccctcccttaccgcgtcataggcac

SEQ ID NO: 81 - DNA, 1548 bp, Artificial Sequence
  Synthetic
aatccaagagaaaatttcttgaagtgtttttctcagtatatcccgaataatgcgacgaaccttaagttagtatacactcagaacaaccctctatatatgagcgttctaaattctacaatccacaacctaagatttacgtccgacacgactccgaaacccctagttatagtgacaccgtcacgagttagccatatacagggcaccatactatgttccaaaaaagttgggttacaaatacgtacccgtagcgggggacacgacagtgaggggatgagttatattagtcaggtgcctttcgtcatagtggatttaagaaatatgaggtcaattaaaatcgacgttcactcacaaactgcctgggttgaggcgggggccacattgggtgaagtatattactgggtcaatgagaagaacgagaatctttcactagcagccggttattgtcccacagtctgcgccggcggtcactttggcggcggcggatacggtcccttaatgagaaattacgggcttgccgcagacaatatcatagatgctcacttagttaatgttcatggaaaagtgttagaccgtaaaagcatgggggaggatctgttttgggcgcttagagggggaggggcagaatcatttggaataatagtggcatggaaaatcaggcttgtggctgttccaaagagtaccatgttctcagtaaagaaaataatggagatccatgagctagttaaacttgtgaataaatggcaaaacatagcctataaatatgataaggacttgctgcttatgactcatttcataaccagaaacattacggataaccaagggaagaacaaaacagccatccatacctactttagctccgttttcttgggtggtgtagacagcttagttgacctgatgaacaagagttttccggaactaggtatcaagaagacagattgtagacaactttcctggattgataccataatcttttacagcggagtcgtcaattatgacactgacaacttcaacaaggaaattttattagataggagtgcgggtcaaaatggggccttcaagatcaaactagactacgttaaaaaacccattcctgaaagtgtttttgttcagattctggagaagctgtatgaagaagatattggcgcggggatgtacgctctttatccgtacggcggcataatggatgagattagtgaaagcgccatccctttcccccacagagctggtatcctgtacgagttgtggtatatctgctcctgggagaaacaggaggataacgaaaagcacttaaattggattaggaatatctacaatttcatgacgccctacgtttccaagaaccccaggttggcctatttgaactacagggatcttgatattggaatcaacgaccccaaaaacccaaacaactacacccaggcaaggatttggggagagaagtacttcgggaagaacttcgacaggctagttaaggtgaaaacgctagttgatccaaataattttttcagaaacgaacagagtatccctcccttaccgcgtcataggcac

SEQ ID NO: 82 - DNA, 1548 bp, Artificial Sequence
  Synthetic
aatccaagagaaaatttcttgaagtgtttttctcagtatatcccgaataatgcgacgaaccttaagttagtatacactcagaacaaccctctatatatgagcgttctaaattctacaatccacaacctaagatttacgtccgacacgactccgaaacccctagttatagtgacaccgtcacatgttagccatatacagggcaccatactatgttccaaaaaagttgggttacaaatacgtacccgtagcgggggacacgacagtgaggggatgagttatattagtcaggtgcctttcgtcatagtggatttaagaaatatgaggtcaattaaaatcgacgttcactcacaaactgcctgggttgaggcgggggccacattgggtgaagtatattactgggtcaatgagaagaacgagaatctttcactagcagccggttattgtcccacagtctgcgccggcggtcactttggcggcggcggatacggtcccttaatgagaaattacgggcttgccgcagacaatatcatagatgctcacttagttaatgttcatggaaaagtgttagaccgtaaaagcatgggggaggatctgttttgggcgcttagagggggaggggcagaatcatttggaataatagtggcatggaaaatcaggcttgtggctgttccaaagagtaccatgttctcagtaaagaaaataatggagatccatgagctagttaaacttgtgaataaatggcaaaacatagcctataaatatgataaggacttgctgcttatgactcatttcataaccagaaacattacggataaccaagggaagaacaaaacagccatccatacctactttagctccgttttcttgggtggtgtagacagcttagttgacctgatgaacaagagttttccggaactaggtatcaagaagacagattgtagacaactttcctggattgataccataatctttatgagcggagtcgtcaattatgacactgacaacttcaacaaggaaattttattagataggagtgcgggtcaaaatggggccttcaagatcaaactagactacgttaaaaaacccattcctgaaagtgtttttgttcagattctggagaagctgtatgaagaagatattggcgcggggatgtacgctctttatccgtacggcggcataatggatgagattagtgaaagcgccatccctttcccccacagagctggtatcctgtacgagttgtggtatatctgctcctgggagaaacaggaggataacgaaaagcacttaaattggattaggaatatctacaatttcatgacgccctacgtttccaagaaccccaggttggcctatttgaactacagggatcttgatattggaatcaacgaccccaaaaacccaaacaactacacccaggcaaggatttggggagagaagtacttcgggaagaacttcgacaggctagttaaggtgaaaacgctagttgatccaaataattttttcagaaacgaacagagtatccctcccttaccgcgtcataggcac

SEQ ID NO: 83 - DNA, 1548 bp, Artificial Sequence
  Synthetic
aatccaagagaaaatttcttgaagtgtttttctcagtatatcccgaataatgcgacgaaccttaagttagtatacactcagaacaaccctctatatatgagcgttctaaattctacaatccacaacctaagatttacgtccgacacgactccgaaacccctagttatagtgacaccgtcacatgttagccatatacagggcaccatactatgttccaaaaaagttgggttacaaatacgtacccgtagcgggggacacgacagtgaggggatgagttatattagtcaggtgcctttcgtcatagtggatttaagaaatatgaggtcaattaaaatcgacgttcactcacaaactgcctgggttgaggcgggggccacattgggtgaagtatattactgggtcaatgagaagaacgagaatctttcactagcagccggttattgtcccacagtctgcgccggcggtcactttggcggcggcggatacggtcccttaatgagaaattacgggcttgccgcagacaatatcatagatgctcacttagttaatgttcatggaaaagtgttagaccgtaaaagcatgggggaggatctgttttgggcgcttagagggggaggggcagaatcatttggaataatagtggcatggaaaatcaggcttgtggctgttccaaagagtaccatgttctcagtaaagaaaataatggagatccatgagctagttaaacttgtgaataaatggcaaaacatagcctataaatatgataaggacttgctgcttatgactcatttcataaccagaaacattacggataaccaagggaagaacaaaacagccatccatacctactttagctccgttttcttgggtggtgtagacagcttagttgacctgatgaacaagagttttccggaactaggtatcaagaagacagattgtagacaactttcctggattgataccataatcttttacagcggagtcgtcaattatgacactgacaacttcaacaaggaaattttattagataggagtgcgggtcaaaatggggccttcaagtctaaactagactacgttaaaaaacccattcctgaaagtgtttttgttcagattctggagaagctgtatgaagaagatattggcgcggggatgtacgctctttatccgtacggcggcataatggatgagattagtgaaagcgccatccctttcccccacagagctggtatcctgtacgagttgtggtatatctgctcctgggagaaacaggaggataacgaaaagcacttaaattggattaggaatatctacaatttcatgacgccctacgtttccaagaaccccaggttggcctatttgaactacagggatcttgatattggaatcaacgaccccaaaaacccaaacaactacacccaggcaaggatttggggagagaagtacttcgggaagaacttcgacaggctagttaaggtgaaaacgctagttgatccaaataattttttcagaaacgaacagagtatccctcccttaccgcgtcataggcac

SEQ ID NO: 84 - DNA, 1548 bp, Artificial Sequence
  Synthetic
aatccaagagaaaatttcttgaagtgtttttctcagtatatcccgaataatgcgacgaaccttaagttagtatacactcagaacaaccctctatatatgagcgttctaaattctacaatccacaacctaagatttacgtccgacacgactccgaaacccctagttatagtgacaccgtcacatgttagccatatacagggcaccatactatgttccaaaaaagttgggttacaaatacgtacccgtagcgggggacacgacagtgaggggatgagttatattagtcaggtgcctttcgtcatagtggatttaagaaatatgaggtcaattaaaatcgacgttcactcacaaactgcctgggttgaggcgggggccacattgggtgaagtatattactgggtcaatgagaagaacgagaatctttcactagcagccggttattgtcccacagtctgcgccggcggtcactttggcggcggcggatacggtcccttaatgagaaattacgggcttgccgcagacaatatcatagatgctcacttagttaatgttcatggaaaagtgttagaccgtaaaagcatgggggaggatctgttttgggcgcttagagggggaggggcagaatcatttggaataatagtggcatggaaaatcaggcttgtggctgttccaaagagtaccatgttctcagtaaagaaaataatggagatccatgagctagttaaacttgtgaataaatggcaaaacatagcctataaatatgataaggacttgctgcttatgactcatttcataaccagaaacattacggataaccaagggaagaacaaaacagccatccatacctactttagctccgttttcttgggtggtgtagacagcttagttgacctgatgaacaagagttttccggaactaggtatcaagaagacagattgtagacaactttcctggattgataccataatcttttacagcggagtcgtcaattatgacactgacaacttcaacaaggaaattttattagataggagtgcgggtcaaaatggggccttcaagatcaaactagactacgttaaaaaacccattcctgaaagtgtttttgttcagattctggagaagctgtatgaagaagatattggcgcggggatgtacattctttatccgtacggcggcataatggatgagattagtgaaagcgccatccctttcccccacagagctggtatcctgtacgagttgtggtatatctgctcctgggagaaacaggaggataacgaaaagcacttaaattggattaggaatatctacaatttcatgacgccctacgtttccaagaaccccaggttggcctatttgaactacagggatcttgatattggaatcaacgaccccaaaaacccaaacaactacacccaggcaaggatttggggagagaagtacttcgggaagaacttcgacaggctagttaaggtgaaaacgctagttgatccaaataattttttcagaaacgaacagagtatccctcccttaccgcgtcataggcac

SEQ ID NO: 85 - DNA, 1548 bp, Artificial Sequence
  Synthetic
aatccaagagaaaatttcttgaagtgtttttctcagtatatcccgaataatgcgacgaaccttaagttagtatacactcagaacaaccctctatatatgagcgttctaaattctacaatccacaacctaagatttacgtccgacacgactccgaaacccctagttatagtgacaccgtcacatgttagccatatacagggcaccatactatgttccaaaaaagttgggttacaaatacgtacccgtagcgggggacacgacagtgaggggatgagttatattagtcaggtgcctttcgtcatagtggatttaagaaatatgaggtcaattaaaatcgacgttcactcacaaactgcctgggttgaggcgggggccacattgggtgaagtatattactgggtcaatgagaagaacgagaatctttcactagcagccggttattgtcccacagtctgcgccggcggtcactttggcggcggcggatacggtcccttaatgagaaattacgggcttgccgcagacaatatcatagatgctcacttagttaatgttcatggaaaagtgttagaccgtaaaagcatgggggaggatctgttttgggcgcttagagggggaggggcagaatcatttggaataatagtggcatggaaaatcaggcttgtggctgttccaaagagtaccatgttctcagtaaagaaaataatggagatccatgagctagttaaacttgtgaataaatggcaaaacatagcctataaatatgataaggacttgctgcttatgactcatttcataaccagaaacattacggataaccaagggaagaacaaaacagccatccatacctactttagctccgttttcttgggtggtgtagacagcttagttgacctgatgaacaagagttttccggaactaggtatcaagaagacagattgtagacaactttcctggattgataccataatcttttacagcggagtcgtcaattatgacactgacaacttcaacaaggaaattttattagataggagtgcgggtcaaaatggggccttcaagatcaaactagactacgttaaaaaacccattcctgaaagtgtttttgttcagattctggagaagctgtatgaagaagatattggcgcggggatgtacctcctttatccgtacggcggcataatggatgagattagtgaaagcgccatccctttcccccacagagctggtatcctgtacgagttgtggtatatctgctcctgggagaaacaggaggataacgaaaagcacttaaattggattaggaatatctacaatttcatgacgccctacgtttccaagaaccccaggttggcctatttgaactacagggatcttgatattggaatcaacgaccccaaaaacccaaacaactacacccaggcaaggatttggggagagaagtacttcgggaagaacttcgacaggctagttaaggtgaaaacgctagttgatccaaataattttttcagaaacgaacagagtatccctcccttaccgcgtcataggcac

SEQ ID NO: 86 - DNA, 1548 bp, Artificial Sequence
  Synthetic
aatccaagagaaaatttcttgaagtgtttttctcagtatatcccgaataatgcgacgaaccttaagttagtatacactcagaacaaccctctatatatgagcgttctaaattctacaatccacaacctaagatttacgtccgacacgactccgaaacccctagttatagtgacaccgtcacatgttagccatatacagggcaccatactatgttccaaaaaagttgggttacaaatacgtacccgtagcgggggacacgacagtgaggggatgagttatattagtcaggtgcctttcgtcatagtggatttaagaaatatgaggtcaattaaaatcgacgttcactcacaaactgcctgggttgaggcgggggccacattgggtgaagtatattactgggtcaatgagaagaacgagaatctttcactagcagccggttattgtcccacagtctgcgccggcggtcactttggcggcggcggatacggtcccttaatgagaaattacgggcttgccgcagacaatatcatagatgctcacttagttaatgttcatggaaaagtgttagaccgtaaaagcatgggggaggatctgttttgggcgcttagagggggaggggcagaatcatttggaataatagtggcatggaaaatcaggcttgtggctgttccaaagagtaccatgttctcagtaaagaaaataatggagatccatgagctagttaaacttgtgaataaatggcaaaacatagcctataaatatgataaggacttgctgcttatgactcatttcataaccagaaacattacggataaccaagggaagaacaaaacagccatccatacctactttagctccgttttcttgggtggtgtagacagcttagttgacctgatgaacaagagttttccggaactaggtatcaagaagacagattgtagacaactttcctggattgataccataatcttttacagcggagtcgtcaattatgacactgacaacttcaacaaggaaattttattagataggagtgcgggtcaaaatggggccttcaagatcaaactagactacgttaaaaaacccattcctgaaagtgtttttgttcagattctggagaagctgtatgaagaagatattggcgcggggatgtacatgctttatccgtacggcggcataatggatgagattagtgaaagcgccatccctttcccccacagagctggtatcctgtacgagttgtggtatatctgctcctgggagaaacaggaggataacgaaaagcacttaaattggattaggaatatctacaatttcatgacgccctacgtttccaagaaccccaggttggcctatttgaactacagggatcttgatattggaatcaacgaccccaaaaacccaaacaactacacccaggcaaggatttggggagagaagtacttcgggaagaacttcgacaggctagttaaggtgaaaacgctagttgatccaaataattttttcagaaacgaacagagtatccctcccttaccgcgtcataggcac

SEQ ID NO: 87 - DNA, 1551 bp, Artificial Sequence
  Synthetic
aacccacaggaaaatttcctgaagtgtttttcccaatacataccgaataacgcgacgaatgctaaactcgtgtatactcaaaatgatcccttatatatgtcagtactaaacagtaccatccaaaatttgcggtttacatcggacactactccaaaacctttggttattgttacacctagcaatgtcagtcatattcagggtaccatcttatgctctaagaaagtcgggcttcaaataagaacacgatcaggcggtcacgatgcagagggaatgtcgtacatttcacaagtaccattcgttattgttgatctaaggaacatgagatctattaagatagacgtgcattctcagactgcctgggttgaagctggtgcaacattgggagaagtgtattactggataaacgagaaaaatgaaaatttatcttttcccgcgggctattgtcctaccgtaggtgcagggggtcacttctctggagggggttatggagccctgatgagaaactacggtcttgctgctgataatatcattgacgctcatctagttaatgttgatggaaaagtattggaccgtaaatccatgggcgaggatttattttgggccatcaggggtgggggcggtgaaagtttcggcattattgtcgcatggaagatccgtcttgtggcagttccatcaaaaagcacgatgttttcagtcaagaaaaacatggaaatacatgaactggtcaaattagtgaataagtggcaaaacatcgcgtataaatacgataaggatttgcttctgatgacacatttcataactcgcaatattaccgacaaccaaggtaaaaataagacaactattcactcgtatttttcttccatattcttgggaggtgtagattccctcgttgatcttatgaataaatcatttccagaactaggcatcaaaaaaacagactgcaagcagttatcctggatcgataccattatattttactcgggagttgtcaattacgatacaactaactttaagaaagagattttattggacagaagtgccggtcaaaacgctgcattcaagatcaagttggattatgtgaaaaaacccatacctgaaaccgttatggtaaaaattctggagaaactatatgaagaagatgtcggcgttggtatgtatgttttatacccttatggaggtatcatggacgagattagtgaatcagctattccattcccgcacagagctggaatcatgtatgagctttggtacatagcgtcatgggaaaaacaagaagataatgaaaagcatttaaactggataaggaatgtatataattttatgactccatacgtgagccagaatcctagattagcatatttgaactacagagacttagatttaggtaagaataaccccaaaagtccaaacaattatacgcaagccaggatatggggagaaaagtactttggtaaaaattttaatagacttgtaaaggttaagacgaaagtcgacccgaacaatttctttcggaacgagcaatctattccgccactgcctcgccatagacat

SEQ ID NO: 88 - DNA, 1548 bp, Artificial Sequence
  Synthetic
aatccaagagaaaatttcttgaagtgtttttctcagtatatcccgaataatgcgacgaaccttaagttagtatacactcagaacaaccctctatatatgagcgttctaaattctacaatccacaacctaagatttacgtccgacacgactccgaaacccctagttatagtgacaccgtcacatgttagccatatacagggcaccatactatgttccaaaaaagttgggttacaaatacgtacccgtagcgggggacacgacagtgaggggatgagttatattagtcaggtgcctttcgtcatagtggatttaagaaatatgaggtcaattaaaatcgacgttcactcacaaactgcctgggttgaggcgggggccacattgggtgaagtatattactgggtcaatgagaagaacgagaatctttcactagcagccggttattgtcccacagtctgcgccggcggtcactttggcggcggcggatacggtcccttaatgagaaattacgggcttgccgcagacaatatcatagatgctcacttagttaatgttcatggaaaagtgttagaccgtaaaagcatgggggaggatctgttttgggcgcttagagggggaggggcagaatcatttggaataatagtggcatggaaaatcaggcttgtggctgttccaaagagtaccatgttctcagtaaagaaaataatggagatccatgagctagttaaacttgtgaataaatggcaaaacatagcctataaatatgataaggacttgctgcttatgactcatttcataaccagaaacattacggataaccaagggaagaacaaaacagccatccatacctactttagctccgttttcttgggtggtgtagacagcttagttgacctgatgaacaagagttttccggaactaggtatcaagaagacagattgtagacaactttcctggattgataccataatcttttacagcggagtcgtcaattatgacactgacaacttcaacaaggaaattttattagataggagtgcgggtcaaaatggggccttcaagatcaaactagactacgttaaaaaacccattcctgaaagtgtttttgttcagattctggagaagctgtatgaagaagatattggcgcggggatgtacgctctttttccgtacggcggcataatggatgagattagtgaaagcgccatccctttcccccacagagctggtatcctgtacgagttgtggtatatctgctcctgggagaaacaggaggataacgaaaagcacttaaattggattaggaatatctacaatttcatgacgccctacgtttccaagaaccccaggttggcctatttgaactacagggatcttgatattggaatcaacgaccccaaaaacccaaacaactacacccaggcaaggatttggggagagaagtacttcgggaagaacttcgacaggctagttaaggtgaaaacgctagttgatccaaataattttttcagaaacgaacagagtatccctcccttaccgcgtcataggcac

SEQ ID NO: 89 - DNA, 1548 bp, Artificial Sequence
  Synthetic
aatccaagagaaaatttcttgaagtgtttttctcagtatatcccgaataatgcgacgaaccttaagttagtatacactcagaacaaccctctatatatgagcgttctaaattctacaatccacaacctaagatttacgtccgacacgactccgaaacccctagttatagtgacaccgtcacatgttagccatatacagggcaccatactatgttccaaaaaagttgggttacaaatacgtacccgtagcgggggacacgacgccgaggggatgagttatattagtcaggtgcctttcgtcatagtggatttaagaaatatgaggtcaattaaaatcgacgttcactcacaaactgcctgggttgaggcgggggccacattgggtgaagtatattactgggtcaatgagaagaacgagaatctttcactagcagccggttattgtcccacagtctgcgccggcggtcactttggcggcggcggatacggtcccttaatgagaaattacgggcttgccgcagacaatatcatagatgctcacttagttaatgttcatggaaaagtgttagaccgtaaaagcatgggggaggatctgttttgggcgcttagagggggaggggcagaatcatttggaataatagtggcatggaaaatcaggcttgtggctgttccaaagagtaccatgttctcagtaaagaaaataatggagatccatgagctagttaaacttgtgaataaatggcaaaacatagcctataaatatgataaggacttgctgcttatgactcatttcataaccagaaacattacggataaccaagggaagaacaaaacagccatccatacctactttagctccgttttcttgggtggtgtagacagcttagttgacctgatgaacaagagttttccggaactaggtatcaagaagacagattgtagacaactttcctggattgataccataatcttttacagcggagtcgtcaattatgacactgacaacttcaacaaggaaattttattagataggagtgcgggtcaaaatggggccttcaagatcaaactagactacgttaaaaaacccattcctgaaagtgtttttgttcagattctggagaagctgtatgaagaagatattggcgcggggatgtacgctctttatccgtacggcggcataatggatgagattagtgaaagcgccatccctttcccccacagagctggtatcctgtacgagttgtggtatatctgctcctgggagaaacaggaggataacgaaaagcacttaaattggattaggaatatctacaatttcatgacgccctacgtttccaagaaccccaggttggcctatttgaactacagggatcttgatattggaatcaacgaccccaaaaacccaaacaactacacccaggcaaggatttggggagagaagtacttcgggaagaacttcgacaggctagttaaggtgaaaacgctagttgatccaaataattttttcagaaacgaacagagtatccctcccttaccgcgtcataggcac

SEQ ID NO: 90 - DNA, 1548 bp, Artificial Sequence
  Synthetic
aatccaagagaaaatttcttgaagtgtttttctcagtatatcccgaataatgcgacgaaccttaagttagtatacactcagaacaaccctctatatatgagcgttctaaattctacaatccacaacctaagatttacgtccgacacgactccgaaacccctagttatagtgacaccgtcacatgttagccatatacagggcaccatactatgttccaaaaaagttgggttacaaatacgtacccgtagcgggggacacgacagtgaggggatgagttatattagtcaggtgcctttcgtcatagtggatttaagaaatatgaggtcaattaaaatcgacgttcactcacaaactgcctgggttgaggcgggggccacattgggtgaagtatattactgggtcaatgagaagaacgagaatctttcactagcagccggttattgtcccacagtctgcgccggcggtcactttggcggcggcggatacggtcccttaatgagaaattacgggcttgccgcagacaatatcatagatgctcacttagttaatgttcatggaaaagtgttagaccgtaaaagcatgggggaggatctgttttgggcgcttagagggggaggggcagaatcatttggaataatagtggcatggaaaatcaggcttgtggctgttccaaagagtaccatgttctcagtaaagaaaataatggagatccatgagctagttaaacttgtgaataaatggcaaaacatagcctataaatatgataaggacttgctgctttggactcatttcataaccagaaacattacggataaccaagggaagaacaaaacagccatccatacctactttagctccgttttcttgggtggtgtagacagcttagttgacctgatgaacaagagttttccggaactaggtatcaagaagacagattgtagacaactttcctggattgataccataatcttttacagcggagtcgtcaattatgacactgacaacttcaacaaggaaattttattagataggagtgcgggtcaaaatggggccttcaagatcaaactagactacgttaaaaaacccattcctgaaagtgtttttgttcagattctggagaagctgtatgaagaagatattggcgcggggatgtacgctctttatccgtacggcggcataatggatgagattagtgaaagcgccatccctttcccccacagagctggtatcctgtacgagttgtggtatatctgctcctgggagaaacaggaggataacgaaaagcacttaaattggattaggaatatctacaatttcatgacgccctacgtttccaagaaccccaggttggcctatttgaactacagggatcttgatattggaatcaacgaccccaaaaacccaaacaactacacccaggcaaggatttggggagagaagtacttcgggaagaacttcgacaggctagttaaggtgaaaacgctagttgatccaaataattttttcagaaacgaacagagtatccctcccttaccgcgtcataggcac

SEQ ID NO: 91 - DNA, 1548 bp, Artificial Sequence
  Synthetic
aatccaagagaaaatttcttgaagtgtttttctcagtatatcccgaataatgcgacgaaccttaagttagtatacactcagaacaaccctctatatatgagcgttctaaattctacaatccacaacctaagatttacgtccgacacgactccgaaacccctagttatagtgacaccgtcacatgttagccatatacagggcaccatactatgttccaaaaaagttgggttacaaatacgtacccgtagcgggggacacgacggtgaggggatgagttatattagtcaggtgcctttcgtcatagtggatttaagaaatatgaggtcaattaaaatcgacgttcactcacaaactgcctgggttgaggcgggggccacattgggtgaagtatattactgggtcaatgagaagaacgagaatctttcactagcagccggttattgtcccacagtctgcgccggcggtcactttggcggcggcggatacggtcccttaatgagaaattacgggcttgccgcagacaatatcatagatgctcacttagttaatgttcatggaaaagtgttagaccgtaaaagcatgggggaggatctgttttgggcgcttagagggggaggggcagaatcatttggaataatagtggcatggaaaatcaggcttgtggctgttccaaagagtaccatgttctcagtaaagaaaataatggagatccatgagctagttaaacttgtgaataaatggcaaaacatagcctataaatatgataaggacttgctgcttatgactcatttcataaccagaaacattacggataaccaagggaagaacaaaacagccatccatacctactttagctccgttttcttgggtggtgtagacagcttagttgacctgatgaacaagagttttccggaactaggtatcaagaagacagattgtagacaactttcctggattgataccataatcttttacagcggagtcgtcaattatgacactgacaacttcaacaaggaaattttattagataggagtgcgggtcaaaatggggccttcaagatcaaactagactacgttaaaaaacccattcctgaaagtgtttttgttcagattctggagaagctgtatgaagaagatattggcgcggggatgtacgctctttatccgtacggcggcataatggatgagattagtgaaagcgccatccctttcccccacagagctggtatcctgtacgagttgtggtatatctgctcctgggagaaacaggaggataacgaaaagcacttaaattggattaggaatatctacaatttcatgacgccctacgtttccaagaaccccaggttggcctatttgaactacagggatcttgatattggaatcaacgaccccaaaaacccaaacaactacacccaggcaaggatttggggagagaagtacttcgggaagaacttcgacaggctagttaaggtgaaaacgctagttgatccaaataattttttcagaaacgaacagagtatccctcccttaccgcgtcataggcac

SEQ ID NO: 92 - DNA, 1548 bp, Artificial Sequence
  Synthetic
aatccaagagaaaatttcttgaagtgtttttctcagtatatcccgaataatgcgacgaaccttaagttagtatacactcagaacaaccctctatatatgagcgttctaaattctacaatccacaacctaagatttacgtccgacacgactccgaaacccctagttatagtgacaccgtcacatgttagccatatacagggcaccatactatgttccaaaaaagttgggttacaaatacgtacccgtagcgggggacacgacagtgaggggatgagttatattagtcaggtgcctttcgtcatagtggatttaagaaatatgaggtcaattaaaatcgacgttcactcacaaactgcctgggttgaggcgggggccacattgggtgaagtatattactgggtcaatgagaagaacgagaatctttcactagcagccggttattgtcccacagtctgcgccggcggtcactttggcggcggcggatacggtcccttaatgagaaattacgggcttgccgcagacaatatcatagatgctcacttagttaatgttcatggaaaagtgttagaccgtaaaagcatgggggaggatctgttttgggcgcttagagggggaggggcagaatcatttggaataatagtggcatggaaaatcaggcttgtggctgttccaaagagtaccatgttctcagtaaagaaaataatggagatccatgagctagttaaacttgtgaataaatggcaaaacatagcctataaatatgataaggacttgctgcttatgactcatttcataaccagaaacattacggataaccaagggaagaacaaaacagccatccatacctactttagctccgttttcttgggtggtgtagacagcttagttgacctgatgaacaagagttttccggaactaggtatcaagaagacagattgtagacaactttcctggattgataccataatcttttacagcggagtcgtcaattatgacactgacaacttcaacaaggaaattttattagataggagtgcgggtcaaaatggggccttcaagatcaaactagactacgttaaaaaacccattcctgaaagtgtttttgttcagattctggagaagctgtatgaagaagatattggcgcggggatgtacgctcttattccgtacggcggcataatggatgagattagtgaaagcgccatccctttcccccacagagctggtatcctgtacgagttgtggtatatctgctcctgggagaaacaggaggataacgaaaagcacttaaattggattaggaatatctacaatttcatgacgccctacgtttccaagaaccccaggttggcctatttgaactacagggatcttgatattggaatcaacgaccccaaaaacccaaacaactacacccaggcaaggatttggggagagaagtacttcgggaagaacttcgacaggctagttaaggtgaaaacgctagttgatccaaataattttttcagaaacgaacagagtatccctcccttaccgcgtcataggcac

SEQ ID NO: 93 - DNA, 1548 bp, Artificial Sequence
  Synthetic
aatccaagagaaaatttcttgaagtgtttttctcagtatatcccgaataatgcgacgaaccttaagttagtatacactcagaacaaccctctatatatgagcgttctaaattctacaatccacaacctaagatttacgtccgacacgactccgaaacccctagttatagtgacaccgtcacatgttagccatatacagggcaccatactatgttccaaaaaagttgggttacaaatacgtacccgtagcgggggacacgacagtgaggggatgagttatattagtcaggtgcctttcgtcatagtggatttaagaaatatgaggtcaattaaaatcgacgttcactcacaaactgcctgggttgaggcgggggccacattgggtgaagtatattactgggtcaatgagaagaacgagaatctttcactagcagccggttattgtcccacagtctgcgccggcggtcactttggcggcggcggatacggtcccttaatgagaaattacgggcttgccgcagacaatatcatagatgctcacttagttaatgttcatggaaaagtgttagaccgtaaaagcatgggggaggatctgttttgggcgcttagagggggaggggcagaatcatttggaataatagtggcatggaaaatcaggcttgtggctgttccaaagagtaccatgttctcagtaaagaaaataatggagatccatgagctagttaaacttgtgaataaatggcaaaacatagcctataaatatgataaggacttgctgcttatgactcatttcataaccagaaacattacggataaccaagggaagaacaaaacagccatccatacctactttagctccgttttcttgggtggtgtagacagcttagttgacctgatgaacaagagttttccggaactaggtatcaagaagacagattgtagacaactttcctggattgataccataatcttttacagcggagtcgtcaattatgacactgacaacttcaacaaggaaattttattagataggagtgcgggtcaaaatggggccttcaagatcaaactagactacgttaaaaaacccattcctgaaagtgtttttgttcagattctggagaagctgtatgaagaagatattggcgcggggatgtacgctcttatgccgtacggcggcataatggatgagattagtgaaagcgccatccctttcccccacagagctggtatcctgtacgagttgtggtatatctgctcctgggagaaacaggaggataacgaaaagcacttaaattggattaggaatatctacaatttcatgacgccctacgtttccaagaaccccaggttggcctatttgaactacagggatcttgatattggaatcaacgaccccaaaaacccaaacaactacacccaggcaaggatttggggagagaagtacttcgggaagaacttcgacaggctagttaaggtgaaaacgctagttgatccaaataattttttcagaaacgaacagagtatccctcccttaccgcgtcataggcac

SEQ ID NO: 94 - DNA, 1548 bp, Artificial Sequence
  Synthetic
aatccaagagaaaatttcttgaagtgtttttctcagtatatcccgaataatgcgacgaaccttaagttagtatacactcagaacaaccctctatatatgagcgttctaaattctacaatccacaacctaagatttacgtccgacacgactccgaaacccctagttatagtgacaccgtcacatgttagccatatacagggcaccatactatgttccaaaaaagttgggttacaaatacgtacccgtagcgggggacacgacagtgaggggatgagttatattagtcaggtgcctttcgtcatagtggatttaagaaatatgaggtcaattaaaatcgacgttcactcacaaactgcctgggttgaggcgggggccacattgggtgaagtatattactgggtcaatgagaagaacgagactctttcactagcagccggttattgtcccacagtctgcgccggcggtcactttggcggcggcggatacggtcccttaatgagaaattacgggcttgccgcagacaatatcatagatgctcacttagttaatgttcatggaaaagtgttagaccgtaaaagcatgggggaggatctgttttgggcgcttagagggggaggggcagaatcatttggaataatagtggcatggaaaatcaggcttgtggctgttccaaagagtaccatgttctcagtaaagaaaataatggagatccatgagctagttaaacttgtgaataaatggcaaaacatagcctataaatatgataaggacttgctgcttatgactcatttcataaccagaaacattacggataaccaagggaagaacaaaacagccatccatacctactttagctccgttttcttgggtggtgtagacagcttagttgacctgatgaacaagagttttccggaactaggtatcaagaagacagattgtagacaactttcctggattgataccataatcttttacagcggagtcgtcaattatgacactgacaacttcaacaaggaaattttattagataggagtgcgggtcaaaatggggccttcaagatcaaactagactacgttaaaaaacccattcctgaaagtgtttttgttcagattctggagaagctgtatgaagaagatattggcgcggggatgtacgctctttatccgtacggcggcataatggatgagattagtgaaagcgccatccctttcccccacagagctggtatcctgtacgagttgtggtatatctgctcctgggagaaacaggaggataacgaaaagcacttaaattggattaggaatatctacaatttcatgacgccctacgtttccaagaaccccaggttggcctatttgaactacagggatcttgatattggaatcaacgaccccaaaaacccaaacaactacacccaggcaaggatttggggagagaagtacttcgggaagaacttcgacaggctagttaaggtgaaaacgctagttgatccaaataattttttcagaaacgaacagagtatccctcccttaccgcgtcataggcac

SEQ ID NO: 95 - DNA, 1548 bp, Artificial Sequence
  Synthetic
aatccaagagaaaatttcttgaagtgtttttctcagtatatcccgaataatgcgacgaaccttaagttagtatacactcagaacaaccctctatatatgagcgttctaaattctacaatccacaacctaagatttacgtccgacacgactccgaaacccctagttatagtgacaccgtcacatgttagccatatacagggcaccatactatgttccaaaaaagttgggttacaaatacgtacccgtagcgggggacacgacagtgaggggatgagttatattagtcaggtgcctttcgtcatagtggatttaagaaatatgaggtcaattaaaatcgacgttgaatcacaaactgcctgggttgaggcgggggccacattgggtgaagtatattactgggtcaatgagaagaacgagaatctttcactagcagccggttattgtcccacagtctgcgccggcggtcactttggcggcggcggatacggtcccttaatgagaaattacgggcttgccgcagacaatatcatagatgctcacttagttaatgttcatggaaaagtgttagaccgtaaaagcatgggggaggatctgttttgggcgcttagagggggaggggcagaatcatttggaataatagtggcatggaaaatcaggcttgtggctgttccaaagagtaccatgttctcagtaaagaaaataatggagatccatgagctagttaaacttgtgaataaatggcaaaacatagcctataaatatgataaggacttgctgcttatgactcatttcataaccagaaacattacggataaccaagggaagaacaaaacagccatccatacctactttagctccgttttcttgggtggtgtagacagcttagttgacctgatgaacaagagttttccggaactaggtatcaagaagacagattgtagacaactttcctggattgataccataatcttttacagcggagtcgtcaattatgacactgacaacttcaacaaggaaattttattagataggagtgcgggtcaaaatggggccttcaagatcaaactagactacgttaaaaaacccattcctgaaagtgtttttgttcagattctggagaagctgtatgaagaagatattggcgcggggatgtacgctctttatccgtacggcggcataatggatgagattagtgaaagcgccatccctttcccccacagagctggtatcctgtacgagttgtggtatatctgctcctgggagaaacaggaggataacgaaaagcacttaaattggattaggaatatctacaatttcatgacgccctacgtttccaagaaccccaggttggcctatttgaactacagggatcttgatattggaatcaacgaccccaaaaacccaaacaactacacccaggcaaggatttggggagagaagtacttcgggaagaacttcgacaggctagttaaggtgaaaacgctagttgatccaaataattttttcagaaacgaacagagtatccctcccttaccgcgtcataggcac

SEQ ID NO: 96 - DNA, 1548 bp, Artificial Sequence
  Synthetic
aatccaagagaaaatttcttgaagtgtttttctcagtatatcccgaataatgcgacgaaccttaagttagtatacactcagaacaaccctctatatatgagcgttctaaattctacaatccacaacctaagatttacgtccgacacgactccgaaacccctagttatagtgacaccgtcacatgttagccatatacagggcaccatactatgttccaaaaaagttgggttagagatacgtacccgtagcgggggacacgacagtgaggggatgagttatattagtcaggtgcctttcgtcatagtggatttaagaaatatgaggtcaattaaaatcgacgttcactcacaaactgcctgggttgaggcgggggccacattgggtgaagtatattactgggtcaatgagaagaacgagaatctttcactagcagccggttattgtcccacagtctgcgccggcggtcactttggcggcggcggatacggtcccttaatgagaaattacgggcttgccgcagacaatatcatagatgctcacttagttaatgttcatggaaaagtgttagaccgtaaaagcatgggggaggatctgttttgggcgcttagagggggaggggcagaatcatttggaataatagtggcatggaaaatcaggcttgtggctgttccaaagagtaccatgttctcagtaaagaaaataatggagatccatgagctagttaaacttgtgaataaatggcaaaacatagcctataaatatgataaggacttgctgcttatgactcatttcataaccagaaacattacggataaccaagggaagaacaaaacagccatccatacctactttagctccgttttcttgggtggtgtagacagcttagttgacctgatgaacaagagttttccggaactaggtatcaagaagacagattgtagacaactttcctggattgataccataatcttttacagcggagtcgtcaattatgacactgacaacttcaacaaggaaattttattagataggagtgcgggtcaaaatggggccttcaagatcaaactagactacgttaaaaaacccattcctgaaagtgtttttgttcagattctggagaagctgtatgaagaagatattggcgcggggatgtacgctctttatccgtacggcggcataatggatgagattagtgaaagcgccatccctttcccccacagagctggtatcctgtacgagttgtggtatatctgctcctgggagaaacaggaggataacgaaaagcacttaaattggattaggaatatctacaatttcatgacgccctacgtttccaagaaccccaggttggcctatttgaactacagggatcttgatattggaatcaacgaccccaaaaacccaaacaactacacccaggcaaggatttggggagagaagtacttcgggaagaacttcgacaggctagttaaggtgaaaacgctagttgatccaaataattttttcagaaacgaacagagtatccctcccttaccgcgtcataggcac

SEQ ID NO: 97 - DNA, 1548 bp, Artificial Sequence
  Synthetic
aatccaagagaaaatttcttgaagtgtttttctcagtatatcccgaataatgcgacgaaccttaagttagtatacactcagaacaaccctctatatatgagcgttctaaattctacaatccacaacctaagatttacgtccgacacgactccgaaacccctagttatagtgacaccgtcacatgttagccatatacagggcaccatactatgttccaaaaaagttgggttacaaatacgtacccgtagcgggggacacgacagtgaggggatgagttatattagtcaggtgcctttcgtcatagtggatttaagaaatatgaggtcaattaaaatcgacgttcactcacaaactgcctgggttgaggcgggggccacattgggtgaagtatattactgggtcaatgagaagaacgagaatctttcactagcagccggttattgtcccacagtctgcgccggcggtcactttggcggcggcggatacggtcccttaatgagaaattacgggcttgccgcagacaatatcatagatgctcacttagttaatgttcatggaaaagtgttagaccgtaaaagcatgggggaggatctgttttgggcgcttagagggggaggggcagaatcatttggaataatagtggcatggaaaatcaggcttgtggctgttccaaagagtaccatgttctcagtaaagaaaataatggagatccatgagctagttaaacttgtgaataaatggcaaaacatagcctataaatatgataaggacttgctgcttatgactcatttcataaccagaaacattacggataaccaagggaagaacaaaacagccatccatacctactttagctccgttttcttgggtggtgtagacagcttagttgacctgatgaacaagagttttccggaactaggtatcaagaagacagattgtagacaaatgtcctggattgataccataatcttttacagcggagtcgtcaattatgacactgacaacttcaacaaggaaattttattagataggagtgcgggtcaaaatggggccttcaagatcaaactagactacgttaaaaaacccattcctgaaagtgtttttgttcagattctggagaagctgtatgaagaagatattggcgcggggatgtacgctctttatccgtacggcggcataatggatgagattagtgaaagcgccatccctttcccccacagagctggtatcctgtacgagttgtggtatatctgctcctgggagaaacaggaggataacgaaaagcacttaaattggattaggaatatctacaatttcatgacgccctacgtttccaagaaccccaggttggcctatttgaactacagggatcttgatattggaatcaacgaccccaaaaacccaaacaactacacccaggcaaggatttggggagagaagtacttcgggaagaacttcgacaggctagttaaggtgaaaacgctagttgatccaaataattttttcagaaacgaacagagtatccctcccttaccgcgtcataggcac

SEQ ID NO: 98 - DNA, 1548 bp, Artificial Sequence
  Synthetic
aatccaagagaaaatttcttgaagtgtttttctcagtatatcccgaataatgcgacgaaccttaagttagtatacactcagaacaaccctctatatatgagcgttctaaattctacaatccacaacctaagatttacgtccgacacgactccgaaacccctagttatagtgacaccgtcacatgttagccatatacagggcaccatactatgttccaaaaaagttgggttacaaatacgtacccgtagcgggggacacgacagtgaggggatgagttatattagtcaggtgcctttcgtcatagtggatttaagaaatatgaggtcaattaaaatcgacgttcactcacaaactgcctgggttgaggcgggggccacattgggtgaagtatattactgggtcaatgagaagaacgagaatctttcactagcagccggttattgtcccacagtctgcgccggcggtcactttggcggcggcggatacggtcccttaatgagaaattacgggcttgccgcagacaatatcatagatgctcacttagttaatgttcatggaaaagtgttagaccgtaaaagcatgggggaggatctgttttgggcgcttagagggggaggggcagaatcatttggaataatagtggcatggaaaatcaggcttgtggctgttccaaagagtaccatgttctcagtaaagaaaataatggagatccatgagctagttaaacttgtgaataaatggcaaaacatagcctataaatatgataaggacttgctgcttatgactcatttcataaccagaaacattacggataaccaagggaagaacaaaacagccatccatacctactttagctccgttttcttgggtggtgtagacagcttagttgacctgatgaacaagagttttccggaactaggtatcaagaagacagattgtagacaactttcctggattgataccataatcttttacagcggagtcgtcaattatgacactgacaacttcaacaaggaaattttattagataggagtgcgggtttgaatggggccttcaagatcaaactagactacgttaaaaaacccattcctgaaagtgtttttgttcagattctggagaagctgtatgaagaagatattggcgcggggatgtacgctctttatccgtacggcggcataatggatgagattagtgaaagcgccatccctttcccccacagagctggtatcctgtacgagttgtggtatatctgctcctgggagaaacaggaggataacgaaaagcacttaaattggattaggaatatctacaatttcatgacgccctacgtttccaagaaccccaggttggcctatttgaactacagggatcttgatattggaatcaacgaccccaaaaacccaaacaactacacccaggcaaggatttggggagagaagtacttcgggaagaacttcgacaggctagttaaggtgaaaacgctagttgatccaaataattttttcagaaacgaacagagtatccctcccttaccgcgtcataggcac

SEQ ID NO: 99 - DNA, 1548 bp, Artificial Sequence
  Synthetic
aatccaagagaaaatttcttgaagtgtttttctcagtatatcccgaataatgcgacgaaccttaagttagtatacactcagaacaaccctctatatatgagcgttctaaattctacaatccacaacctaagatttacgtccgacacgactccgaaacccctagttatagtgacaccgtcacatgttagccatatacagggcaccatactatgttccaaaaaagttgggttacaaatacgtacccgtagcgggggacacgacagtgaggggatgagttatattagtcaggtgcctttcgtcatagtggatttaagaaatatgaggtcaattaaaatcgacgttcactcacaaactgcctgggttgaggcgggggccacattgggtgaagtatattactgggtcaatgagaagaacgagaatctttcactagcagccggttattgtcccacagtctgcgccggcggtcactttggcggcggcggatacggtcccttaatgagaaattacgggcttgccgcagacaatatcatagatgctcacttagttaatgttcatggaaaagtgttagaccgtaaaagcatgggggaggatctgttttgggcgcttagagggggaggggcagaatcatttggaataatagtggcatggaaaatcaggcttgtggctgttccaaagagtaccatgttctcagtaaagaaaataatggagatccatgagctagttaaacttgtgaataaatggcaaaacatagcctataaatatgataaggacttgctgcttatgactcatttcataaccagaaacattacggataaccaagggaagaacaaaacagccatccatacctactttagctccgttttcttgggtggtgtagacagcttagttgacctgatgaacaagagttttccggaactaggtatcaagaagacagattgtagacaactttcctggattgataccataatcttttacagcggagtcgtcaattatgacactgacaacttcaacaaggaaattttattagataggagtgcgggttacaatggggccttcaagatcaaactagactacgttaaaaaacccattcctgaaagtgtttttgttcagattctggagaagctgtatgaagaagatattggcgcggggatgtacgctctttatccgtacggcggcataatggatgagattagtgaaagcgccatccctttcccccacagagctggtatcctgtacgagttgtggtatatctgctcctgggagaaacaggaggataacgaaaagcacttaaattggattaggaatatctacaatttcatgacgccctacgtttccaagaaccccaggttggcctatttgaactacagggatcttgatattggaatcaacgaccccaaaaacccaaacaactacacccaggcaaggatttggggagagaagtacttcgggaagaacttcgacaggctagttaaggtgaaaacgctagttgatccaaataattttttcagaaacgaacagagtatccctcccttaccgcgtcataggcac

SEQ ID NO: 100 - DNA, 1548 bp, Artificial Sequence
  Synthetic
aatccaagagaaaatttcttgaagtgtttttctcagtatatcccgaataatgcgacgaaccttaagttagtatacactcagaacaaccctctatatatgagcgttctaaattctacaatccacaacctaagatttacgtccgacacgactccgaaacccctagttatagtgacaccgtcacatgttagccatatacagggcaccatactatgttccaaaaaagttgggttacaaatacgtacccgtagcgggggacacgacagtgaggggatgagttatattagtcaggtgcctttcgtcatagtggatttaagaaatatgaggtcaattaaaatcgacgttcactcacaaactgcctgggttgaggcgggggccacattgggtgaagtatattactgggtcaatgagaagaacgagaatctttcactagcagccggttattgtcccacagtctgcgccggcggtcactttggcggcggcggatacggtcccttaatgagaaattacgggcttgccgcagacaatatcatagatgctcacttagttaatgttcatggaaaagtgttagaccgtaaaagcatgggggaggatctgttttgggcgcttagagggggaggggcagaatcatttggaataatagtggcatggaaaatcaggcttgtggctgttccaaagagtaccatgttctcagtaaagaaaataatggagatccatgagctagttaaacttgtgaataaatggcaaaacatagcctataaatatgataaggacttgctgcttatgactcatttcataaccagaaacattacggataaccaagggaagaacaaaacagccatccatacctactttagctccgttttcttgggtggtgtagacagcttagttgacctgatgaacaagagttttccggaactaggtatcaagaagacagattgtagacaactttcctggattgataccataatcttttacagcggagtcgtcaattatgacactgacaacttcaacaaggaaattttattagataggagtgcgggtcaaaataaagccttcaagatcaaactagactacgttaaaaaacccattcctgaaagtgtttttgttcagattctggagaagctgtatgaagaagatattggcgcggggatgtacgctctttatccgtacggcggcataatggatgagattagtgaaagcgccatccctttcccccacagagctggtatcctgtacgagttgtggtatatctgctcctgggagaaacaggaggataacgaaaagcacttaaattggattaggaatatctacaatttcatgacgccctacgtttccaagaaccccaggttggcctatttgaactacagggatcttgatattggaatcaacgaccccaaaaacccaaacaactacacccaggcaaggatttggggagagaagtacttcgggaagaacttcgacaggctagttaaggtgaaaacgctagttgatccaaataattttttcagaaacgaacagagtatccctcccttaccgcgtcataggcac

SEQ ID NO: 101 - DNA, 1548 bp, Artificial Sequence
  Synthetic
aatccaagagaaaatttcttgaagtgtttttctcagtatatcccgaataatgcgacgaaccttaagttagtatacactcagaacaaccctctatatatgagcgttctaaattctacaatccacaacctaagatttacgtccgacacgactccgaaacccctagttatagtgacaccgtcacatgttagccatatacagggcaccatactatgttccaaaaaagttgggttacaaatacgtacccgtagcgggggacacgacagtgaggggatgagttatattagtcaggtgcctttcgtcatagtggatttaagaaatatgaggtcaattaaaatcgacgttcactcacaaactgcctgggttgaggcgggggccacattgggtgaagtatattactgggtcaatgagaagaacgagaatctttcactagcagccggttattgtcccacagtctgcgccggcggtcactttggcggcggcggatacggtcccttaatgagaaattacgggcttgccgcagacaatatcatagatgctcacttagttaatgttcatggaaaagtgttagaccgtaaaagcatgggggaggatctgttttgggcgcttagagggggaggggcagaatcatttggaataatagtggcatggaaaatcaggcttgtggctgttccaaagagtaccatgttctcagtaaagaaaataatggagatccatgagctagttaaacttgtgaataaatggcaaaacatagcctataaatatgataaggacttgctgcttatgactcatttcataaccagaaacattacggataaccaagggaagaacaaaacagccatccatacctactttagctccgttttcttgggtggtgtagacagcttagttgacctgatgaacaagagttttccggaactaggtatcaagaagacagattgtagacaactttcctggattgataccataatcttttacagcggagtcgtcaattatgacactgacaacttcaacaaggaaattttattagataggagtgcgggtcaaaatggggccttcaagatcaaactagactacgttaaaaaacccattcctgaaagtgtttttgttcagattctggagaagctgtatgaagaagatattggcgcggggatgtacacactttatccgtacggcggcataatggatgagattagtgaaagcgccatccctttcccccacagagctggtatcctgtacgagttgtggtatatctgctcctgggagaaacaggaggataacgaaaagcacttaaattggattaggaatatctacaatttcatgacgccctacgtttccaagaaccccaggttggcctatttgaactacagggatcttgatattggaatcaacgaccccaaaaacccaaacaactacacccaggcaaggatttggggagagaagtacttcgggaagaacttcgacaggctagttaaggtgaaaacgctagttgatccaaataattttttcagaaacgaacagagtatccctcccttaccgcgtcataggcac

SEQ ID NO: 102 - DNA, 1548 bp, Artificial Sequence
  Synthetic
aatccaagagaaaatttcttgaagtgtttttctcagtatatcccgaataatgcgacgaaccttaagttagtatacactcagaacaaccctctatatatgagcgttctaaattctacaatccacaacctaagatttacgtccgacacgactccgaaacccctagttatagtgacaccgtcacatgttagccatatacagggcaccatactatgttccaaaaaagttgggttacaaatacgtacccgtagcgggggacacgacagtgaggggatgagttatattagtcaggtgcctttcgtcatagtggatttaagaaatatgaggtcaattaaaatcgacgttcactcacaaactgcctgggttgaggcgggggccacattgggtgaagtatattactgggtcaatgagaagaacgagaatctttcactagcagccggttattgtcccacagtctgcgccggcggtcactttggcggcggcggatacggtcccttaatgagaaattacgggcttgccgcagacaatatcatagatgctcacttagttaatgttcatggaaaagtgttagaccgtaaaagcatgggggaggatctgttttgggcgcttagagggggaggggcagaatcatttggaataatagtggcatggaaaatcaggcttgtggctgttccaaagagtaccatgttctcagtaaagaaaataatggagatccatgagctagttaaacttgtgaataaatggcaaaacatagcctataaatatgataaggacttgctgcttatgactcatttcataaccagaaacattacggataaccaagggaagaacaaaacagccatccatacctactttagctccgttttcttgggtggtgtagacagcttagttgacctgatgaacaagagttttccggaactaggtatcaagaagacagattgtagacaactttcctggattgataccataatcttttacagcggagtcgtcaattatgacactgacaacttcaacaaggaaattttattagataggagtgcgggtcaaaatggggccttcaagatcaaactagactacgttaaaaaacccattcctgaaagtgtttttgttcagattctggagaagctgtatgaagaagatattggcgcggggatgtacgtcctttatccgtacggcggcataatggatgagattagtgaaagcgccatccctttcccccacagagctggtatcctgtacgagttgtggtatatctgctcctgggagaaacaggaggataacgaaaagcacttaaattggattaggaatatctacaatttcatgacgccctacgtttccaagaaccccaggttggcctatttgaactacagggatcttgatattggaatcaacgaccccaaaaacccaaacaactacacccaggcaaggatttggggagagaagtacttcgggaagaacttcgacaggctagttaaggtgaaaacgctagttgatccaaataattttttcagaaacgaacagagtatccctcccttaccgcgtcataggcac

SEQ ID NO: 103 - DNA, 1548 bp, Artificial Sequence
  Synthetic
aatccaagagaaaatttcttgaagtgtttttctcagtatatcccgaataatgcgacgaaccttaagttagtatacactcagaacaaccctctatatatgagcgttctaaattctacaatccacaacctaagatttacgtccgacacgactccgaaacccctagttatagtgacaccgtcacatgttagccatatacagggcaccatactatgttccaaaaaagttgggttacaaatacgtacccgtagcgggggacacgacagtgaggggatgagttatattagtcaggtgcctttcgtcatagtggatttaagaaatatgaggtcaattaaaatcgacgttcactcacaaactgcctgggttgaggcgggggccacattgggtgaagtatattactgggtcaatgagaagaacgagaatctttcactagcagccggttattgtcccacagtctgcgccggcggtcactttggcggcggcggatacggtcccttaatgagaaattacgggcttgccgcagacaatatcatagatgctcacttagttaatgttcatggaaaagtgttagaccgtaaaagcatgggggaggatctgttttgggcgcttagagggggaggggcagaatcatttggaataatagtggcatggaaaatcaggcttgtggctgttccaaagagtaccatgttctcagtaaagaaaataatggagatccatgagctagttaaacttgtgaataaatggcaaaacatagcctataaatatgataaggacttgctgcttatgactcatttcataaccagaaacattacggataaccaagggaagaacaaaacagccatccatacctactttagctccgttttcttgggtggtgtagacagcttagttgacctgatgaacaagagttttccggaactaggtatcaagaagacagattgtagacaactttcctggattgataccataatcttttacagcggagtcgtcaattatgacactgacaacttcaacaaggaaattttattagataggagtgcgggtcaaaatggggccttcaagatcaaactagactacgttaaaaaacccattcctgaaagtgtttttgaacagattctggagaagctgtatgaagaagatattggcgcggggatgtacgctctttatccgtacggcggcataatggatgagattagtgaaagcgccatccctttcccccacagagctggtatcctgtacgagttgtggtatatctgctcctgggagaaacaggaggataacgaaaagcacttaaattggattaggaatatctacaatttcatgacgccctacgtttccaagaaccccaggttggcctatttgaactacagggatcttgatattggaatcaacgaccccaaaaacccaaacaactacacccaggcaaggatttggggagagaagtacttcgggaagaacttcgacaggctagttaaggtgaaaacgctagttgatccaaataattttttcagaaacgaacagagtatccctcccttaccgcgtcataggcac

SEQ ID NO: 104 - DNA, 1548 bp, Artificial Sequence
  Synthetic
aatccaagagaaaatttcttgaagtgtttttctcagtatatcccgaataatgcgacgaaccttaagttagtatacactcagaacaaccctctatatatgagcgttctaaattctacaatccacaacctaagatttacgtccgacacgactccgaaacccctagttatagtgacaccgtcacatgttagccatatacagggcaccatactatgtgcaaaaaaagttgggttacaaatacgtacccgtagcgggggacacgacagtgaggggatgagttatattagtcaggtgcctttcgtcatagtggatttaagaaatatgaggtcaattaaaatcgacgttcactcacaaactgcctgggttgaggcgggggccacattgggtgaagtatattactgggtcaatgagaagaacgagaatctttcactagcagccggttattgtcccacagtctgcgccggcggtcactttggcggcggcggatacggtcccttaatgagaaattacgggcttgccgcagacaatatcatagatgctcacttagttaatgttcatggaaaagtgttagaccgtaaaagcatgggggaggatctgttttgggcgcttagagggggaggggcagaatcatttggaataatagtggcatggaaaatcaggcttgtggctgttccaaagagtaccatgttctcagtaaagaaaataatggagatccatgagctagttaaacttgtgaataaatggcaaaacatagcctataaatatgataaggacttgctgcttatgactcatttcataaccagaaacattacggataaccaagggaagaacaaaacagccatccatacctactttagctccgttttcttgggtggtgtagacagcttagttgacctgatgaacaagagttttccggaactaggtatcaagaagacagattgtagacaactttcctggattgataccataatcttttacagcggagtcgtcaattatgacactgacaacttcaacaaggaaattttattagataggagtgcgggtcaaaatggggccttcaagatcaaactagactacgttaaaaaacccattcctgaaagtgtttttgttcagattctggagaagctgtatgaagaagatattggcgcggggatgtacgctctttatccgtacggcggcataatggatgagattagtgaaagcgccatccctttcccccacagagctggtatcctgtacgagttgtggtatatctgctcctgggagaaacaggaggataacgaaaagcacttaaattggattaggaatatctacaatttcatgacgccctacgtttccaagaaccccaggttggcctatttgaactacagggatcttgatattggaatcaacgaccccaaaaacccaaacaactacacccaggcaaggatttggggagagaagtacttcgggaagaacttcgacaggctagttaaggtgaaaacgctagttgatccaaataattttttcagaaacgaacagagtatccctcccttaccgcgtcataggcac

SEQ ID NO: 105 - DNA, 1557 bp, Artificial Sequence
  Synthetic
aacccgcaagagaatttcctaaagtgcttttctcagtatatccctaataacgccacgaaaagtaatgcgaaattggtatacactcaaaacgacccactttatatgtcagtgttaaatagcacaattcaaaatctgcggtttacctcggataccacacccaagccattagttatagttactccttctaacgtcagccacattcagggaactatattgtgttcaaaaaaagtcgggctccaaatcagaacacgttccggtggccatgatgcagaaggtatgagttacatttctcaggtaccattcgttattgtagacctacgcaatatgagatccataaagattgatgttcattcacaaactgcatgggtggaagctggtgctactttgggggaagtgtattactggatcaacgaaaaaaatgagaatttatcttttccggccggatactgtcctaccgttggcgctggtggtcacttcagcggtggaggatatggcgcactgatgcgaaactatggtttagctgcggataacatcattgatgctcatttagtaaatgtcgacggcaaagttcttgacagaaagtccatgggggaggatttgttttgggccataaggggtggaggtggtgaaagttttggaatcattgtagcatggaaaataagacttgtggccgttccatcaaagtcgacgatgttcagcgtcaagaagaatatggaaatacatgagctagtcaaattagtaaataaatggcaaaatattgcctataaatacgataaggatttgcttctgatgacacacttcataaccaggaatattacagacaaccaaggcaaaaacaaaactactattcattcatacttttcttcgatttttttgggcggtgtggatagtctcgtggacctcatgaacaagtccttccccgaattaggaattaaaaagactgattgcaaacagctatcttggatcgacaccataattttttatagtggggttgttaattacgatacaacgaactttaagaaggaaattttattggaccgttccgctggtcaaaatgcagctttcaaaataaagctagattatgttaaaaaaccgatccctgagacagttatggtcaaaattttagaaaaactgtacgaggaagatgttggtgtcggtatgtatgtgttgtatccatatggaggaataatggatgaaatttcagaatctgcaatcccatttcctcacagagctggtataatgtatgaactttggtatattgcgagctgggaaaagcaagaagataatgaaaagcatctgaattggatcagaaatgtttacaactttatgactccttatgtttcgcaaaatcctaggttggcttacttgaactaccgcgaccttgatctcgggaaaaacaatccaaagagccccaacaattacacacaggctagaatatggggcgagaaatattttggtaagaatttcaaccgattagtgaaggtcaaaacgaaagtagacccaaataatttctttcgtaacgagcaatctattcctcccttaccacggcacagacat

SEQ ID NO: 106 - DNA, 1548 bp, Artificial Sequence
  Synthetic
aatccaagagaaaatttcttgaagtgtttttctcagtatatcccgaataatgcgacgaaccttaagttagtatacactcagaacaaccctctatatatgagcgttctaaattctacaatccacaacctaagatttacgtccgacacgactccgaaacccctagttatagtgacaccgtcacatgttagccatatacagggcaccatactatgttccaaaaaagttgggttacaaatacgtacccgtagcgggggacacgacagtgaggggatgagttatattagtcaggtgcctttcgtcatagtggatttaagaaatatgaggtcaattaaaatcgacgttcactcacaaactgcctgggttgaggcgggggccacattgggtgaagtatattactgggtcaatgagaagaacgagaatctttcactagcagccggttattgtcccacagtctgcgccggcggtcactttggcggcggcggatacggtcccttaatgagaaattacgggcttgccgcagacaatatcatagatgctcacttagttaatgttcatggaaaagtgttagaccgtaaaagcatgggggaggatctgttttgggcgcttagagggggaggggcagaatcatttggaataatagtggcatggaaaatcaggcttgtggctgttccaaagagtaccatgttctcagtaaagaaaatattggagatccatgagctagttaaacttgtgaataaatggcaaaacatagcctataaatatgataaggacttgctgcttatgactcatttcataaccagaaacattacggataaccaagggaagaacaaaacagccatccatacctactttagctccgttttcttgggtggtgtagacagcttagttgacctgatgaacaagagttttccggaactaggtatcaagaagacagattgtagacaactttcctggattgataccataatcttttacagcggagtcgtcaattatgacactgacaacttcaacaaggaaattttattagataggagtgcgggtcaaaatggggccttcaagatcaaactagactacgttaaaaaacccattcctgaaagtgtttttgttcagattctggagaagctgtatgaagaagatattggcgcggggatgtacgctctttatccgtacggcggcataatggatgagattagtgaaagcgccatccctttcccccacagagctggtatcctgtacgagttgtggtatatctgctcctgggagaaacaggaggataacgaaaagcacttaaattggattaggaatatctacaatttcatgacgccctacgtttccaagaaccccaggttggcctatttgaactacagggatcttgatattggaatcaacgaccccaaaaacccaaacaactacacccaggcaaggatttggggagagaagtacttcgggaagaacttcgacaggctagttaaggtgaaaacgctagttgatccaaataattttttcagaaacgaacagagtatccctcccttaccgcgtcataggcac

SEQ ID NO: 107 - DNA, 1551 bp, Artificial Sequence
  Synthetic
aatccacaagagaactttcttaaatgtttctctcagtacatcccgacgaatgtcactaacgcgaagttagtttatacccaacatgaccagttctatatgagtatactgaatagcacaattcaaaacttgcgttttacatcggatactactcctaaaccattggtaattatcacccctctcaatgtgtcccacatacaagggacaattctatgctctaaaaaggttggtttacaaatccgaacgaggtcaggcggacatgatgcagaaggtatgtcatacatttcccaagtaccctttgttgtggtcgatttaagaaatatgcattctataaaaattgacgttcacagtcagacagcctgggtagaagctggtgctaccttgggagaagtctattactggattaacgagaagaatgaaaatttaagcttcccaggcggttattgtcccactgttggagtcggtggccactttagcgggggtggttatggagcactaatgagaaactacggcctggccgctgataacataatcgacgcacatcttgttaatgtagatggtaaagtactagatcgcaagagtatgggagaagatctattttgggccattcgtgggggtggtggagagaatttcggcataattgctgcatggaaaataaagcttgttgcggtgccttcaaaatccactatcttttctgttaaaaagaacatggaaattcatggcttggtcaaattattcaataagtggcaaaatatcgcttataagtacgacaaagatttggtgctgatgacacactttataactaagaacattacagacaatcatggtaaaaacaaaaccaccgtgcacgggtacttttcttcaatttttcatggcggtgtcgattcgctggtagacttgatgaataaaagcttcccggagttaggtattaaaaagactgattgtaaagaattttcttggatagatactacaattttctattccggagttgtaaactttaatactgccaatttcaaaaaagaaatcttacttgacagatctgctgggaaaaagacggcattttctataaaattggattacgttaagaaaccaatacccgaaaccgcaatggttaaaatcctggagaagttatatgaagaagatgtgggagctggtatgtatgtactatacccatacggtggcataatggaagagatctcagaatccgcaatccctttcccacatcgggctggtatcatgtatgaattatggtatacagccagttgggaaaagcaagaagataacgaaaagcatattaactgggtgagatcggtctacaattttaccactccctatgttagtcaaaaccctagactagcctatttgaattatagggacttagatctcggaaaaacgaaccacgcatcacctaataactacacccaggcgagaatttggggtgagaagtacttcggtaaaaattttaataggttggtcaaagttaaaacaaaggttgatcccaacaacttctttcgcaatgagcaatcgattccaccattaccgttgcgacatcat

SEQ ID NO: 108 - DNA, 1551 bp, Artificial Sequence
  Synthetic
aacccccgtgaaaattttctgaagtgtttctcgaaacatatacctaataacgttgctaatccgaaattagtatatacgcagcacgaccaattgtacatgtcacttctaaattctaccattcaaaacttacgctttatctccgatactacaccaaagcctctcgtgattgttactccaagtaacaacagccatattcaagcaacaatattgtgctctaaaaaggtcgggcttcagattagaactaggtcaggcggacacgatgccgagggtatgtcctatatctcgcaagtgcccttcgttgtagtcgatttaagaaatatgcatagtataaaaattgacgttcatagccagaccgcgtgggtcgaagctggtgcaacattgggtgaggtgtactattggatcaatgaaaagaatgaaaatctcagttttccaggaggctattgtcctactgtaggtgttgggggtcatttctctggaggcggttacggtgctttgatgcgaaactacgggctagccgctgataatattatcgacgcgcacttggttaacgtcgatggaaaagtcctggatagaaagagcatgggagaggacttattttgggcaataaggggtggcggtggggaaaatttcggcataatcgccgcatggaaaattaaactggtagctgttccatctaaatcgaccatattttcagtaaagaagaatatggaaattcatggtttagtaaaactctttaacaaatggcaaaatatagcttataagtacgataaagatcttgtgctgatgacacacttcattacgaaaaacatcacagataatcatggcaagaacaagactactgttcacggatatttttcctcaatattccatggtggcgttgattctttagtggacctaatgaacaaatcctttccagaattggggatcaagaaaaccgactgcaaggaattttcttggattgatacaactattttctatagtggtgtcgtgaattttaacacagccaatttcaaaaaggagatcctacttgaccggagcgctggtaaaaaaacggcattttccattaaattggattacgttaagaaacctatcccggaaaccgcaatggtcaaaatattagaaaagttgtacgaggaggatgttggagcgggtatgtatgttttatacccatatggtggaattatggaagaaatctcagagagtgctattccgtttccccatcgtgcagggattatgtatgaaatctggtacattgcttcatgggaaaaacaggaggacaatgaaaaacacattaattggataagaaatgtttacaacttcactacaccttatgtgtctcaaaatccacgtatggcatatttgaattatagggatttagatctgggaaagactaactttgagagcccaaataactacacccaagccagaatttggggtgaaaagtactttggcaaaaactttaatagacttgttaaagttaagacaaaggtcgaccccgacaatttcttccgaaacgaacaaagtattcctccattacctttgagacaccat

SEQ ID NO: 109 - DNA, 1554 bp, Artificial Sequence
  Synthetic
gccaatccccgtgaaaacttcttaaaatgcttttctaagcacatcccaaataacgtagcaaatcctaaattggtgtatacacaacatgaccagctttacatgtcaattctaaacagtacgatacaaaatctgaggtttatttcggataccactccaaagccgctcgttatagtcactccatccaataactcacatatccaggcgacaattttgtgttctaaaaaagttggtttacaaattagaacccggagcggagggcatgatgctgagggcatgtcctatatctcccaagtccctttcgtagtggttgaccttagaaatatgcacagtataaagattgatgtccatagtcagactgcctgggttgaagctggtgcaacattaggtgaagtatactattggataaacgaaaagaatgagaacttgtcatttccaggaggctactgtcctactgttggagtcggtgggcacttctctggtggaggctatggtgctctaatgagaaattacggtttagcagcggataacattatagacgcccatctggtgaatgttgatggtaaagttttggaccgaaagtctatgggtgaagatttattttgggctattcgtggaggagggggcgagaacttcggaatcattgcagcttggaaaataaagttggttgcagtacccagcaaatcgaccatcttttctgtcaaaaaaaatatggaaattcacggcctcgtgaaactttttaataagtggcaaaatattgcgtataagtatgataaagatttagttctcatgacacattttatcaccaaaaacatcacggataatcatggtaaaaataagactacggtccacgggtactttagttcaattttccatggtggtgttgattcacttgtagacctaatgaataagtcgttccctgagttggggataaagaaaacagattgcaaagaattttcctggattgacactacgattttctactctggtgttgtcaactttaacacagctaatttcaaaaaagaaattttgctagataggtctgctggcaaaaagacagctttttcaattaaactggactatgtgaaaaaaccgatcccagaaactgccatggtaaagatattagaaaagctgtacgaggaagatgtaggtgcgggtatgtatgtactatacccttatggcggtataatggaggaaatcagtgaaagcgcaataccatttccccaccgcgccggcatcatgtacgagctttggtataccgccagttgggaaaaacaagaagataatgagaagcatatcaactgggttagatcagtttataatttcactaccccctacgtgtcgcaaaacccacggttggcctatctaaattatagagacttagatttgggtaaaacaaatcatgcttcaccaaataactacactcaggctaggatatggggcgaaaaatacttcggtaagaactttaatagattagttaaagtcaagacgaaggttgatccgaataatttttttagaaacgagcaatccattcctcccttaccgagacacagacat

SEQ ID NO: 110 - DNA, 1548 bp, Artificial Sequence
  Synthetic
aatccaagagaaaatttcttgaagtgtttttctcagtatatcccgaataatgcgacgaaccttaagttagtatacactcagaacaaccctctatatatgagcgttctaaattctacaatccacaacctaagatttacgtccgacacgactccgaaacccctagttatagtgacaccgtcacatgttagccatatacagggcaccatactatgttccaaaaaagttgggttacaaatacgtacccgtagcgggggacacgacagtgaggggatgagttatattagtcaggtgcctttcgtcatagtggatttaagaaatatgaggtcaattaaaatcgacgttcactcacaaactgcctgggttgaggcgggggccacattgggtgaagtatattactgggtcaatgagaagaacgagaatctttcactagcagccggttattgtcccacagtctgcgccggcggtcactttggcggcggcggatacggtcccttaatgagaaattacgggcttgccgcagacaatatcatagatgctcacttagttaatgttcatggaaaagtgttagaccgtaaaagcatgggggaggatctgttttgggcgcttagagggggaggggcagaatcatttggaataatagtggcatggaaaatcaggcttgtggctgttccaaagagtaccatgttctcagtaaagaaaataatggagatccatgagctagttaaacttgtgaataaatggcaaaacatagcctataaatatgataaggacttgactcttatgactcatttcataaccagaaacattacggataaccaagggaagaacaaaacagccatccatacctactttagctccgttttcttgggtggtgtagacagcttagttgacctgatgaacaagagttttccggaactaggtatcaagaagacagattgtagacaactttcctggattgataccataatcttttacagcggagtcgtcaattatgacactgacaacttcaacaaggaaattttattagataggagtgcgggtcaaaatggggccttcaagatcaaactagactacgttaaaaaacccattcctgaaagtgtttttgttcagattctggagaagctgtatgaagaagatattggcgcggggatgtacgctctttatccgtacggcggcataatggatgagattagtgaaagcgccatccctttcccccacagagctggtatcctgtacgagttgtggtatatctgctcctgggagaaacaggaggataacgaaaagcacttaaattggattaggaatatctacaatttcatgacgccctacgtttccaagaaccccaggttggcctatttgaactacagggatcttgatattggaatcaacgaccccaaaaacccaaacaactacacccaggcaaggatttggggagagaagtacttcgggaagaacttcgacaggctagttaaggtgaaaacgctagttgatccaaataattttttcagaaacgaacagagtatccctcccttaccgcgtcataggcac

SEQ ID NO: 111 - DNA, 1548 bp, Artificial Sequence
  Synthetic
aatccaagagaaaatttcttgaagtgtttttctcagtatatcccgaataatgcgacgaaccttaagttagtatacactcagaacaaccctctatatatgagcgttctaaattctacaatccacaacctaagatttacgtccgacacgactccgaaacccctagttatagtgacaccgtcacatgttagccatatacagggcaccatactatgttccaaaaaagttgggttacaaatacgtacccgtagcgggggacacgacagtgaggggatgagttatattagtcaggtgcctttcgtcatagtggatttaagaaatatgaggtcaattaaaatcgacgttcactcacaaactgcctgggttgaggcgggggccacattgggtgaagtatattactgggtcaatgagaagaacgagaatctttcactagcagccggttattgtcccacagtctgcgccggcggtcactttggcggcggcggatacggtcccttaatgagaaattacgggcttgccgcagacaatatcatagatgctcacttagttaatgttcatggaaaagtgttagaccgtaaaagcatgggggaggatctgttttgggcgcttagagggggaggggcagaatcatttggaataatagtggcatggaaaatcaggcttgtggctgttccaaagagtaccatgttctcagtaaagaaaataatggagatccatgagctagttaaacttgtgaataaatggcaaaacatagcctataaatatgataaggacttgctgcttatgactcatttcataaccagaaacattacggataaccaagggaagaacaaaacagccatccatacctactttagctccgttttcttgggtggtgtagacagcttagttgacctgatgaacaagagttttccggaactaggtatcaagaagacagattgtagacaactttcctggattgataccataatcttttacagcggagtcgtcaattatgacactgacaacttcaacaaggaaattttattagataggagtgcgggtcaaaatggggccttcaagatcaaactagactacgttaaaaaacccattcctgaaagtgtttttgttcagattctggagaagctgtatgaagaagatattggcgcggggatgtacgctctttatccgtacggcggcataatggatgagattagtgaaagcgccatccctttcccccacagagctggtatcctgtacgagttgtggtatgtatgctcctgggagaaacaggaggataacgaaaagcacttaaattggattaggaatatctacaatttcatgacgccctacgtttccaagaaccccaggttggcctatttgaactacagggatcttgatattggaatcaacgaccccaaaaacccaaacaactacacccaggcaaggatttggggagagaagtacttcgggaagaacttcgacaggctagttaaggtgaaaacgctagttgatccaaataattttttcagaaacgaacagagtatccctcccttaccgcgtcataggcac

SEQ ID NO: 112 - DNA, 1551 bp, Artificial Sequence
  Synthetic
aatcctcgtgagaactttctcaaatgcttctccaagcatatacccaataacgttgcaaatccgaaattggtatatacgcagcacgaccaactgtacatgtcaatcttaaatagtactattcaaaaccttcgatttatttcggataccacaccaaagcctttggtgatagttactccatctaacaattctcatatccaagcgacaattttatgtagcaaaaaggtcggcctacagattagaacccgcagtgggggtcacgatgccgaaggtatgtcctatatatctcaagtaccattcgtcgtggttgacttaaggaacatgcattcaattaaaatcgatgtgcactcgcaaactgcttgggttgaagctggagcaacgttaggtgaggtatactattggattaatgaaaagaatgaaaatttgtcttttccgggaggttactgtcccaccgttggcgtgggcggtcatttttcagggggagggtatggagccctcatgagaaactacggtctagcagctgataatataatagacgctcatcttgtcaatgttgatggtaaagtcctggacagaaaaagcatgggtgaggatctattctgggcgatcaggggtggcgggggagaaaattttggcattatcgccgcctggaagattaaacttgtcgatgtaccatccaaatctacaatattttcagtgaagaagaacatggaaattcatggtttggtaaaattattcaacaagtggcagaacatcgcttataaatatgataaagatttggttctaatgactcattttataacaaaaaacattacagacaatcacggtaagaataaaactaccgttcacggatatttcagttcaatcttccatggaggcgttgattcattggttgatttaatgaacaaatcgtttcctgagcttggtatcaaaaaaaccgattgcaaggaatttagctggatagacacaacgattttctactctggtgtagtgaattttaatacggcaaatttcaagaaggaaatactattagatagaagtgctggcaaaaagactgcattttctattaaattagattacgtgaagaaacccattcctgaaactgccatggttaagattttagaaaagttgtacgaggaggacgtaggcgcagggatgtatgttctgtatccatatggaggtattatggaagaaataagtgagtctgctattccattcccacatcgtgcgggtatcatgtatgaactgtggtatactgcatcctgggaaaagcaagaagataatgaaaaacacattaactgggttcgcagcgtgtacaattttacgacaccgtacgtcagccaaaaccctagactagcttatttgaattacagagatcttgacctgggaaaaaccaaccatgcgtcaccgaataactacacacaggcgcggatatggggcgaaaagtattttggtaagaacttcaataggttggttaaagtcaaaactaaagtggaccccaataatttttttcgtaatgaacaatcgatcccacccttacctccacatcaccat

SEQ ID NO: 113 - DNA, 1548 bp, Artificial Sequence
  Synthetic
aatccaagagaaaatttcttgaagtgtttttctcagtatatcccgaataatgcgacgaaccttaagttagtatacactcagaacaaccctctatatatgagcgttctaaattctacaatccacaacctaagatttacgtccgacacgactccgaaacccctagttatagtgacaccgtcacatgttagccatatacagggcaccatactatgttccaaaaaagttgggttacaaatacgtacccgtagcgggggacacgacagtgaggggatgagttatattagtcaggtgcctttcgtcatagtggatttaagaaatatgaggtcaattaaaatcgacgttcactcacaaactgcctgggttgaggcgggggccacattgggtgaagtatattactgggtcaatgagaagaacgagaatctttcactagcagccggttattgtcccacagtctgcgccggcggtcactttggcggcggcggatacggtcccttaatgagaaattacgggcttgccgcagacaatatcatagatgctcacttagttaatgttcatggaaaagtgttagaccgtaaaagcatgggggaggatctgttttgggcgcttagagggggaggggcagaatcatttggaataatagtggcatggaaaatcaggcttgtggctgttccaaagagtaccatgttctcagtaaagaaaataatggagatccatgagctagttaaacttgtgaataaatggcaaaacatagcctataaatatgataaggacttgctgcttatgactcatttcataaccagaaacattacggataaccaagggaagaacaaaacagccatccatacctactttagctccgttttcttgggtggtgtagacagcttagttgacctgatgaacaagagttttccggaactaggtatcaagaagacagattgtagacaactttcctggattgataccataatcttttacagcggagtcgtcaattatgacactgacaacttcaacaaggaaattttattagataggagtgcgggtcaaaatggggccttcaagatcaaactagactacgttaaaaaacccattcctgaaagtgtttttgttcagattctggagaagctgtatgaagaagatattggcgcggggatgtacgctctttatccgtacggcggcataatggatgagattagtgaaagcgccatccctttcccccacagagctggtatcctgtactctttgtggtatatctgctcctgggagaaacaggaggataacgaaaagcacttaaattggattaggaatatctacaatttcatgacgccctacgtttccaagaaccccaggttggcctatttgaactacagggatcttgatattggaatcaacgaccccaaaaacccaaacaactacacccaggcaaggatttggggagagaagtacttcgggaagaacttcgacaggctagttaaggtgaaaacgctagttgatccaaataattttttcagaaacgaacagagtatccctcccttaccgcgtcataggcac

SEQ ID NO: 114 - DNA, 1548 bp, Artificial Sequence
  Synthetic
aatccaagagaaaatttcttgaagtgtttttctcagtatatcccgaataatgcgacgaaccttaagttagtatacactcagaacaaccctctatatatgagcgttctaaattctacaatccacaacctaagatttacgtccgacacgactccgaaacccctagttatagtgacaccgtcacatgttagccatatacagggcaccatactatgttccaaaaaagttgggttacaaatacgtacccgtagcgggggacacgacagtgaggggatgagttatattagtcaggtgcctttcgtcatagtggatttaagaaatatgaggtcaattaaaatcgacgttcactcacaaactgcctgggttgaggcgggggccacattgggtgaagtatattactgggtcaatgagaagaacgagaatctttcactagcagccggttattgtcccacagtctgcgccggcggtcactttggcggcggcggatacggtcccttaatgagaaattacgggcttgccgcagacaatatcatagatgctcacttagttaatgttcatggaaaagtgttagaccgtaaaagcatgggggaggatctgttttgggcgcttagagggggaggggcagaatcatttggaataatagtggcatggaaaatcaggcttgtggctgttccaaagagtaccatgttctcagtaaagaaaataatggagatccatgagctagttaaacttgtgaataaatggcaaaacatagcctataaatatgataaggacttgctgcttatgactcatttcataaccagaaacattacggataaccaagggaagaacaaaacagccatccatacctactttagctccgttttcttgggtggtgtagacagcttagttgacctgatgaacaagagttttccggaactaggtatcaagaagacagattgtagacaactttcctggattgataccataatcttttacagcggagtcgtcaattatgacactgacaacttcaacaaggaaattttattagataggagtgcgggtcaaaatggggccttcaagatcaaactagactacgttaaaaaacccattcctgaaagtgtttttgttcagattctggagaagctgtatgaagaagatattggcgcggggatgtacgctctttatccgtacggcggcataatggatgagattagtgaaagcgccatccctttcccccacagagctggtatcctgtacactttgtggtatatctgctcctgggagaaacaggaggataacgaaaagcacttaaattggattaggaatatctacaatttcatgacgccctacgtttccaagaaccccaggttggcctatttgaactacagggatcttgatattggaatcaacgaccccaaaaacccaaacaactacacccaggcaaggatttggggagagaagtacttcgggaagaacttcgacaggctagttaaggtgaaaacgctagttgatccaaataattttttcagaaacgaacagagtatccctcccttaccgcgtcataggcac

SEQ ID NO: 115 - DNA, 1551 bp, Artificial Sequence
  Synthetic
aatccgagggaaaacttcctgaagtgcttttccaaacatatacccaataacgttgctaatcctaaacttgtatacacccagcacgaccaactatatatgtctttgctcaacagcacaattcaaaatttaagattcatcagtgatacgactccaaagcctttggtcattgtgacaccatcaaataattcgcatatccaagcaactatactatgttctaaaaaggttggcttgcagattcgtacccgaagtggagggcacgatgcggagggtatgtcatatatatcccaagtgccatttgttgtcgtagacttaaggaacatgcattctattaaaattgatgttcactcgcaaactgcctgggtagaagctggtgcaacgttaggtgaagtttactattggatcaacgagaataatgaaaacctgtcctttccagccggatattgtcctacagtcggcgctggtggccatttttctggtggaggttacggggcgcttatgagaaattatggcctggcagctgataatattatagatgcacaactcgttaatgtggacggaaaagtattagatagaaagtcaatgggtgaggatttattctgggccatccgcgggggtggaggtgaaaacttcggtattatcgctgcctggaagataagattggttgctgtgcccagtatgtccacaatttttagcgttaaaaaaaacatggaaattcatgaattagtcaaattggtcaataagtggcagaacatagcttacatgtacgaaaaagaactattattgtttactcacttcatcactcgtaacattacggacaatcaaggaaagaacaaaaccaccatacatagctatttctcatcgatatttcatggcggtgtggattctttggtagatttgatgaataaatcatttcctgaactcgggataaagaaaacagattgcaagcagctttcctggattgacacgatcattttttactctggactggtcaattataataccacaaattttaaaaaggagatactacttgacagatcaggcggtcggaaagcagcgttttcaatcaaattagactacgttaagaagccgattccagagactgctatggtaaaaatattagaaaaattgtatgaggaagatgtcggtgtggggatgtacgttctgtatccctacggtggcattatggaagaaatcagtgaaagcgccattccattcccacatagagcaggaattatgtatgaattatggtacacagcatcctgggagaaacaagaggacaacgaaaagcacattaactgggtcagatctgtttataatttcactacaccttatgttagtcaaaatccgcggcttgcgtacctaaactatcgagatttggatctaggcaaaactaatccagaatcccccaacaattatactcaagcaaggatttggggtgaaaaatattttggaaaaaactttaaccgcttggtgaaggtcaaaaccaaggccgatcctaataatttctttagaaacgagcagtctataccacccttgcctccacatcaccat

SEQ ID NO: 116 - DNA, 1548 bp, Artificial Sequence
  Synthetic
aatccaagagaaaatttcttgaagtgtttttctcagtatatcccgaataatgcgacgaaccttaagttagtatacactcagaacaaccctctatatatgagcgttctaaattctacaatccacaacctaagatttacgtccgacacgactccgaaacccctagttatagtgacaccgtcacatgttagccatatacagggcaccatactatgttccaaaaaagttgggttacaaatacgtacccgtagcgggggacacgacagtgaggggatgagttatattagtcaggtgcctttcgtcatagtggatttaagaaatatgaggtcaattaaaatcgacgttcactcacaaactgcctgggttgaggcgggggccacattgggtgaagtatattactgggtcaatgagaagaacgagaatctttcactagcagccggttattgtcccacagtctgcgccggcggtcactttggcggcggcggatacggtcccttaatgagaaattacgggcttgccgcagacaatatcatagatgctcacttagttaatgttcatggaaaagtgttagaccgtaaaagcatgggggaggatctgttttgggcgcttagagggggaggggcagaatcatttggaataatagtggcatggaaaatcaggcttgtggctgttccaaagagtaccatgttctcagtaaagaaaataatggagatccatgagctagttaaacttgtgaataaatggcaaaacatagcctataaatatgataaggacttgctgcttatgactcatttcataaccagaaacattacggataaccaagggaagaacaaaacagccatccatacctactttagctccgttttcttgggtggtgtagacagcttagttgacctgatgaacaagagttttccggaactaggtatcaagaagacagattgtagacaactttcctggattgataccataatcttttacagcggagtcgtcaattatgacactgacaacttcaacaaggaaattttattagataggagtgcgggtcaaaatggggccttcaagatcaaactagactacgttaaaaaacccattcctgaaagtgtttttaaacagattctggagaagctgtatgaagaagatattggcgcggggatgtacgctctttatccgtacggcggcataatggatgagattagtgaaagcgccatccctttcccccacagagctggtatcctgtacgagttgtggtatatctgctcctgggagaaacaggaggataacgaaaagcacttaaattggattaggaatatctacaatttcatgacgccctacgtttccaagaaccccaggttggcctatttgaactacagggatcttgatattggaatcaacgaccccaaaaacccaaacaactacacccaggcaaggatttggggagagaagtacttcgggaagaacttcgacaggctagttaaggtgaaaacgctagttgatccaaataattttttcagaaacgaacagagtatccctcccttaccgcgtcataggcac

SEQ ID NO: 117 - DNA, 1548 bp, Artificial Sequence
  Synthetic
aatccaagagaaaatttcttgaagtgtttttctcagtatatcccgaataatgcgacgaaccttaagttagtatacactcagaacaaccctctatatatgagcgttctaaattctacaatccacaacctaagatttacgtccgacacgactccgaaacccctagttatagtgacaccgtcacatgttagccatatacagggcaccatactatgttccaaaaaagttgggttacaaatacgtacccgtagcgggggacacgacagtgaggggatgagttatattagtcaggtgcctttcgtcatagtggatttaagaaatatgaggtcaattaaaatcgacgttcactcacaaactgcctgggttgaggcgggggccacattgggtgaagtatattactgggtcaatgagaagaacgagaatctttcactagcagccggttattgtcccacagtctgcgccggcggtcactttggcggcggcggatacggtcccttaatgagaaattacgggcttgccgcagacaatatcatagatgctcacttagttaatgttcatggaaaagtgttagaccgtaaaagcatgggggaggatctgttttgggcgcttagagggggaggggcagaatcatttggaataatagtggcatggaaaatcaggcttgtggctgttccaaagagtaccatgttctcagtaaagaaaataatggagatccatgagctagttaaacttgtgaataaatggcaaaacatagcctataaatatgataaggacttgctgcttatgactcatttcataaccagaaacattacggataaccaagggaagaacaaaacagccatccatacctactttagctccgttttcttgggtggtgtagacagcttagttgacctgatgaacaagagttttccggaactaggtatcaagaagacagattgtagacaactttcctggattgataccataatcttttacagcggagtcgtcaattatgacactgacaacttcaacaaggaaattttattagataggagtgcgggtcaaaatggggccttcaagatcaaactagactacgttaaaaaacccattcctgaaagtgtttttgttcagattctggagaagctgtatgaagaagatattggcgcggggatgtacgctctttatccgtacggcggcataatggatgagattagtgaaagcgccatccctttcccccacagagctggtatcctgtacgagttgtggtatatctgctcctgggagaaacaggaggatgcagaaaagcacttaaattggattaggaatatctacaatttcatgacgccctacgtttccaagaaccccaggttggcctatttgaactacagggatcttgatattggaatcaacgaccccaaaaacccaaacaactacacccaggcaaggatttggggagagaagtacttcgggaagaacttcgacaggctagttaaggtgaaaacgctagttgatccaaataattttttcagaaacgaacagagtatccctcccttaccgcgtcataggcac

SEQ ID NO: 118 - DNA, 1548 bp, Artificial Sequence
  Synthetic
aatccaagagaaaatttcttgaagtgtttttctcagtatatcccgaataatgcgacgaaccttaagttagtatacactcagaacaaccctctatatatgagcgttctaaattctacaatccacaacctaagatttacgtccgacacgactccgaaacccctagttatagtgacaccgtcacatgttagccatatacagggcaccatactatgttccaaaaaacacgggttacaaatacgtacccgtagcgggggacacgacagtgaggggatgagttatattagtcaggtgcctttcgtcatagtggatttaagaaatatgaggtcaattaaaatcgacgttcactcacaaactgcctgggttgaggcgggggccacattgggtgaagtatattactgggtcaatgagaagaacgagaatctttcactagcagccggttattgtcccacagtctgcgccggcggtcactttggcggcggcggatacggtcccttaatgagaaattacgggcttgccgcagacaatatcatagatgctcacttagttaatgttcatggaaaagtgttagaccgtaaaagcatgggggaggatctgttttgggcgcttagagggggaggggcagaatcatttggaataatagtggcatggaaaatcaggcttgtggctgttccaaagagtaccatgttctcagtaaagaaaataatggagatccatgagctagttaaacttgtgaataaatggcaaaacatagcctataaatatgataaggacttgctgcttatgactcatttcataaccagaaacattacggataaccaagggaagaacaaaacagccatccatacctactttagctccgttttcttgggtggtgtagacagcttagttgacctgatgaacaagagttttccggaactaggtatcaagaagacagattgtagacaactttcctggattgataccataatcttttacagcggagtcgtcaattatgacactgacaacttcaacaaggaaattttattagataggagtgcgggtcaaaatggggccttcaagatcaaactagactacgttaaaaaacccattcctgaaagtgtttttgttcagattctggagaagctgtatgaagaagatattggcgcggggatgtacgctctttatccgtacggcggcataatggatgagattagtgaaagcgccatccctttcccccacagagctggtatcctgtacgagttgtggtatatctgctcctgggagaaacaggaggataacgaaaagcacttaaattggattaggaatatctacaatttcatgacgccctacgtttccaagaaccccaggttggcctatttgaactacagggatcttgatattggaatcaacgaccccaaaaacccaaacaactacacccaggcaaggatttggggagagaagtacttcgggaagaacttcgacaggctagttaaggtgaaaacgctagttgatccaaataattttttcagaaacgaacagagtatccctcccttaccgcgtcataggcac

SEQ ID NO: 119 - DNA, 1548 bp, Artificial Sequence
  Synthetic
aatccaagagaaaatttcttgaagtgtttttctcagtatatcccgaataatgcgacgaaccttaagttagtatacactcagaacaaccctctatatatgagcgttctaaattctacaatccacaacctaagatttacgtccgacacgactccgaaacccctagttatagtgacaccgtcacatgttagccatatacagggcaccatactatgttccaaaaaagttgggttacaaatacgtacccgtagcgggggacacgacagtgaggggatgagttatattagtcaggtgcctttcgtcatagtggatttaagaaatatgaggtcaattaaaatcgacgttcactcacaaactgcctgggttgaggcgggggccacattgggtgaagtatattactgggtcaatgagaagaacgagaatctttcactagcagccggttattgtcccacagtctgcgccggcggtcactttggcggcggcggatacggtcccttaatgagaaattacgggcttgccgcagacaatatcatagatgctcacttagttaatgttcatggaaaagtgttagaccgtaaaagcatgggggaggatctgttttgggcgcttagagggggaggggcagaatcatttggaataatagtggcatggaaaatcaggcttgtggctgttccaaagagtaccatgttctcagtaaagaaaataatggagatccatgagctagttaaacttgtgaataaatggcaaaacatagcctataaatatgataaggacttgctgcttatgactcatttcataaccagaaacattacggataaccaagggaagaacaaaacagccatccatacctactttagctccgttttcttgggtggtgtagacagcttagttgacctgatgaacaagagttttccggaactaggtatcaagaagacagattgtagacaactttcctggattgataccataatcttttacagcggagtcgtcaattatgacactgacaacttcaacaaggaaattttattagataggagtgcgggtcaaaatggggccttcaagatcaaactagactacgttaaaaaacccattcctgaaagtgtttttgttcagattctggagaagctgtatgaagaagatattggcgcggggatgtacgctctttatccgtacggcggcataatggatgagattagtgaaagcgccatccctttcccccacagagctggtatcctgtacgagttgtggtatatctgctcctgggagaaacaggaggataacgaaaagcacttaaattggattaggaatatctacaatttcatgacgccctacgtttccaagaaccccaggttggcctatttgaactacagggatcttgatattggaatcaacgaccccaaaaacccaaacaactacacccaggcaaggatttggggagagaagtacttcgggaagaacttcgacaggctagttaaggtgaaaacgctagttgatccagataattttttcagaaacgaacagagtatccctcccttaccgcgtcataggcac

SEQ ID NO: 120 - DNA, 1548 bp, Artificial Sequence
  Synthetic
aatccaagagaaaatttcttgaagtgtttttctcagtatatcccgaataatgcgacgaaccttaagttagtatacactcagaacaaccctctatatatgagcgttctaaattctacaatccacaacctaagatttacgtccgacacgactccgaaacccctagttatagtgacaccgtcacatgttagccatatacagggcaccatactatgttccaaaaaagttgggttacaaatacgtacccgtagcgggggacacgacagtgaggggatgagttatattagtcaggtgcctttcgtcatagtggatttaagaaatatgaggtcaattaaaatcgacgttcactcacaaactgcctgggttgaggcgggggccacattgggtgaagtatattactgggtcaatgagaagaacgagaatctttcactagcagccggttattgtcccacagtctgcgccggcggtcactttggcggcggcggatacggtcccttaatgagaaattacgggcttgccgcagacaatatcatagatgctcacttagttaatgttcatggaaaagtgttagaccgtaaaagcatgggggaggatctgttttgggcgcttagagggggaggggcagaatcatttggaataatagtggcatggaaaatcaggcttgtggctgttccaaagagtaccatgttctcagtaaagaaaataatggagatccatgagctagttaaacttgtgaataaatggcaaaacatagcctataaatatgataaggacttgctgcttatgactcatttcataaccagaaacattacggataaccaagggaagaacaaaacagccatccatacctactttagctccgttttcttgggtaatgtagacagcttagttgacctgatgaacaagagttttccggaactaggtatcaagaagacagattgtagacaactttcctggattgataccataatcttttacagcggagtcgtcaattatgacactgacaacttcaacaaggaaattttattagataggagtgcgggtcaaaatggggccttcaagatcaaactagactacgttaaaaaacccattcctgaaagtgtttttgttcagattctggagaagctgtatgaagaagatattggcgcggggatgtacgctctttatccgtacggcggcataatggatgagattagtgaaagcgccatccctttcccccacagagctggtatcctgtacgagttgtggtatatctgctcctgggagaaacaggaggataacgaaaagcacttaaattggattaggaatatctacaatttcatgacgccctacgtttccaagaaccccaggttggcctatttgaactacagggatcttgatattggaatcaacgaccccaaaaacccaaacaactacacccaggcaaggatttggggagagaagtacttcgggaagaacttcgacaggctagttaaggtgaaaacgctagttgatccaaataattttttcagaaacgaacagagtatccctcccttaccgcgtcataggcac

SEQ ID NO: 121 - DNA, 1548 bp, Artificial Sequence
  Synthetic
aatccaagagaaaatttcttgaagtgtttttctcagtatatcccgaataatgcgacgaaccttaagttagtatacactcagaacaaccctctatatatgagcgttctaaattctacaatccacaacctaagatttacgtccgacacgactccgaaacccctagttatagtgacaccgtcacatgttagccatatacagggcaccatactatgttccaaaaaagttgggttacaaatacgtacccgtagcgggggacacgacagtgaggggatgagttatattagtaacgtgcctttcgtcatagtggatttaagaaatatgaggtcaattaaaatcgacgttcactcacaaactgcctgggttgaggcgggggccacattgggtgaagtatattactgggtcaatgagaagaacgagaatctttcactagcagccggttattgtcccacagtctgcgccggcggtcactttggcggcggcggatacggtcccttaatgagaaattacgggcttgccgcagacaatatcatagatgctcacttagttaatgttcatggaaaagtgttagaccgtaaaagcatgggggaggatctgttttgggcgcttagagggggaggggcagaatcatttggaataatagtggcatggaaaatcaggcttgtggctgttccaaagagtaccatgttctcagtaaagaaaataatggagatccatgagctagttaaacttgtgaataaatggcaaaacatagcctataaatatgataaggacttgctgcttatgactcatttcataaccagaaacattacggataaccaagggaagaacaaaacagccatccatacctactttagctccgttttcttgggtggtgtagacagcttagttgacctgatgaacaagagttttccggaactaggtatcaagaagacagattgtagacaactttcctggattgataccataatcttttacagcggagtcgtcaattatgacactgacaacttcaacaaggaaattttattagataggagtgcgggtcaaaatggggccttcaagatcaaactagactacgttaaaaaacccattcctgaaagtgtttttgttcagattctggagaagctgtatgaagaagatattggcgcggggatgtacgctctttatccgtacggcggcataatggatgagattagtgaaagcgccatccctttcccccacagagctggtatcctgtacgagttgtggtatatctgctcctgggagaaacaggaggataacgaaaagcacttaaattggattaggaatatctacaatttcatgacgccctacgtttccaagaaccccaggttggcctatttgaactacagggatcttgatattggaatcaacgaccccaaaaacccaaacaactacacccaggcaaggatttggggagagaagtacttcgggaagaacttcgacaggctagttaaggtgaaaacgctagttgatccaaataattttttcagaaacgaacagagtatccctcccttaccgcgtcataggcac

SEQ ID NO: 122 - DNA, 1548 bp, Artificial Sequence
  Synthetic
aatccaagagaaaatttcttgaagtgtttttctcagtatatcccgaataatgcgacgaaccttaagttagtatacactcagaacaaccctctatatatgagcgttctaaattctacaatccacaacctaagatttacgtccgacacgactccgaaacccctagttatagtgacaccgtcacatgttagccatatacagggcaccatactatgttccaaaaaagttgggttacaaatacgtacccgtagcgggggacacgacagtgaggggatgagttatattagtcaggtgcctttcgtcatagtggatttaagaaatatgaggtcaattaaaatcgacgttcactcacaaactgcctgggttgaggcgggggccacattgggtgaagtatattactgggtcaatgagaagaacgagaatctttcactagcagccggttattgtcccacagtctgcgccggcggtcactttggcggcggcggatacggtcccttaatgagaaattacgggcttgccgcagacaatatcatagatgctcacttagttaatgttcatggaaaagtgttagaccgtaaaagcatgggggaggatctgttttgggcgcttagagggggaggggcagaatcatttggaataatagtggcatggaaaatcaggcttgtgagggttccaaagagtaccatgttctcagtaaagaaaataatggagatccatgagctagttaaacttgtgaataaatggcaaaacatagcctataaatatgataaggacttgctgcttatgactcatttcataaccagaaacattacggataaccaagggaagaacaaaacagccatccatacctactttagctccgttttcttgggtggtgtagacagcttagttgacctgatgaacaagagttttccggaactaggtatcaagaagacagattgtagacaactttcctggattgataccataatcttttacagcggagtcgtcaattatgacactgacaacttcaacaaggaaattttattagataggagtgcgggtcaaaatggggccttcaagatcaaactagactacgttaaaaaacccattcctgaaagtgtttttgttcagattctggagaagctgtatgaagaagatattggcgcggggatgtacgctctttatccgtacggcggcataatggatgagattagtgaaagcgccatccctttcccccacagagctggtatcctgtacgagttgtggtatatctgctcctgggagaaacaggaggataacgaaaagcacttaaattggattaggaatatctacaatttcatgacgccctacgtttccaagaaccccaggttggcctatttgaactacagggatcttgatattggaatcaacgaccccaaaaacccaaacaactacacccaggcaaggatttggggagagaagtacttcgggaagaacttcgacaggctagttaaggtgaaaacgctagttgatccaaataattttttcagaaacgaacagagtatccctcccttaccgcgtcataggcac

SEQ ID NO: 123 - DNA, 1548 bp, Artificial Sequence
  Synthetic
aatccaagagaaaatttcttgaagtgtttttctcagtatatcccgaataatgcgacgaaccttaagttagtatacactcagaacaaccctctatatatgagcgttctaaattctacaatccacaacctaagatttacgtccgacacgactccgaaacccctagttatagtgacaccgtcacatgttagccatatacagggcaccatactatgttccaaaaaagttgggttacaaatacgtacccgtagcgggggacacgacagtgaggggatgagttatattagtcaggtgcctttcgtcatagtggatttaagaaatatgaggtcaattaaaatcgacgttcactcacaaactgcctgggttgaggcgggggccacattgggtgaagtatattactgggtcaatgagaagaacgagaatctttcactagcagccggttattgtcccacagtctgcgccggcggtcactttggcggcggcggatacggtcccttaatgagaaattacgggcttgccgcagacaatatcatagatgctcacttagttaatgttcatggaaaactcttagaccgtaaaagcatgggggaggatctgttttgggcgcttagagggggaggggcagaatcatttggaataatagtggcatggaaaatcaggcttgtggctgttccaaagagtaccatgttctcagtaaagaaaataatggagatccatgagctagttaaacttgtgaataaatggcaaaacatagcctataaatatgataaggacttgctgcttatgactcatttcataaccagaaacattacggataaccaagggaagaacaaaacagccatccatacctactttagctccgttttcttgggtggtgtagacagcttagttgacctgatgaacaagagttttccggaactaggtatcaagaagacagattgtagacaactttcctggattgataccataatcttttacagcggagtcgtcaattatgacactgacaacttcaacaaggaaattttattagataggagtgcgggtcaaaatggggccttcaagatcaaactagactacgttaaaaaacccattcctgaaagtgtttttgttcagattctggagaagctgtatgaagaagatattggcgcggggatgtacgctctttatccgtacggcggcataatggatgagattagtgaaagcgccatccctttcccccacagagctggtatcctgtacgagttgtggtatatctgctcctgggagaaacaggaggataacgaaaagcacttaaattggattaggaatatctacaatttcatgacgccctacgtttccaagaaccccaggttggcctatttgaactacagggatcttgatattggaatcaacgaccccaaaaacccaaacaactacacccaggcaaggatttggggagagaagtacttcgggaagaacttcgacaggctagttaaggtgaaaacgctagttgatccaaataattttttcagaaacgaacagagtatccctcccttaccgcgtcataggcac

SEQ ID NO: 124 - DNA, 1548 bp, Artificial Sequence
  Synthetic
aatccaagagaaaatttcttgaagtgtttttctcagtatatcccgaataatgcgacgaaccttaagttagtatacactcagaacaaccctctatatatgagcgttctaaattctacaatccacaacctaagatttacgtccgacacgactccgaaacccctagttatagtgacaccgtcacatgttagccatatacagggcaccatactatgttccaaaaaagttgggttacaaatacgtacccgtagcgggggacacgacagtgaggggatgagttatattagtcaggtgcctttcgtcatagtggatttaagaaatatgaggtcaattaaaatcgacgttcactcacaaactgcctgggttgaggcgggggccacattgggtgaagtatattactgggtcaatgagaagaacaaaaatctttcactagcagccggttattgtcccacagtctgcgccggcggtcactttggcggcggcggatacggtcccttaatgagaaattacgggcttgccgcagacaatatcatagatgctcacttagttaatgttcatggaaaagtgttagaccgtaaaagcatgggggaggatctgttttgggcgcttagagggggaggggcagaatcatttggaataatagtggcatggaaaatcaggcttgtggctgttccaaagagtaccatgttctcagtaaagaaaataatggagatccatgagctagttaaacttgtgaataaatggcaaaacatagcctataaatatgataaggacttgctgcttatgactcatttcataaccagaaacattacggataaccaagggaagaacaaaacagccatccatacctactttagctccgttttcttgggtggtgtagacagcttagttgacctgatgaacaagagttttccggaactaggtatcaagaagacagattgtagacaactttcctggattgataccataatcttttacagcggagtcgtcaattatgacactgacaacttcaacaaggaaattttattagataggagtgcgggtcaaaatggggccttcaagatcaaactagactacgttaaaaaacccattcctgaaagtgtttttgttcagattctggagaagctgtatgaagaagatattggcgcggggatgtacgctctttatccgtacggcggcataatggatgagattagtgaaagcgccatccctttcccccacagagctggtatcctgtacgagttgtggtatatctgctcctgggagaaacaggaggataacgaaaagcacttaaattggattaggaatatctacaatttcatgacgccctacgtttccaagaaccccaggttggcctatttgaactacagggatcttgatattggaatcaacgaccccaaaaacccaaacaactacacccaggcaaggatttggggagagaagtacttcgggaagaacttcgacaggctagttaaggtgaaaacgctagttgatccaaataattttttcagaaacgaacagagtatccctcccttaccgcgtcataggcac

SEQ ID NO: 125 - DNA, 1548 bp, Artificial Sequence
  Synthetic
aatccaagagaaaatttcttgaagtgtttttctcagtatatcccgaataatgcgacgaaccttaagttagtatacactcagaacaaccctctatatatgagcgttctaaattctacaatccacaacctaagatttacgtccgacacgactccgaaacccctagttatagtgacaccgtcacatgttagccatatacagggcaccatactatgttccaaaaaagttgggttacaaatacgtacccgtagcgggggacacgacagtgaggggatgagttatattagtcaggtgcctttcgtcatagtggatttaagaaatatgaggtcaattaaaatcgacgttcactcacaaactgcctgggttgaggcgggggccacattgggtgaagtatattactgggtcaatgagaagaacgagaatctttcactagcagccggttattgtcccacagtctgcgccggcggtcactttggcggcggcggatacggtcccttaatgagaaattacgggcttgccgcagacaatatcatagatgctcacttagttaatgttcatggaaaagtgttagaccgtaaaagcatgggggaggatctgttttgggcgcttagagggggaggggcagaatcatttggaataatagtggcatggaaaatcaggcttgtggctgttccaaagagtaccatgttctcagtaaagaaaataatggagatccatgagctagttaaacttgtgaataaatggcaaaacatagcctataaatatgataaggacttgctgcttatgactcatttcataaccagaaacattacggataaccaagggaagaacaaaacagccatccatacctactttagctccgttttcttgggtggtgtagacagcttagttgacctgatgaacaagagttttccggaactaggtatcaagaagacagattgtagacaactttcctggattgataccataatcttttacagcggagtcgtcaattatgacactgacaacttcaacaaggaaattttattagataggagtgcgggtcaaaatggggccttcaagatcaaactagactacgttaaaaaacccattcctgaaagtgtttttgttcagattctggagaagctgtatgaagaagatattggcgcggggatgtacgctctttatccgtacggcggcataatggatgagattagtgaaagcgccatccctttcccccacagagctggtatcctgtacgagttgtggtatatctgctcctgggagaaacaggaggataacgaaaagcacttaaattggattaggaatatctacaatttcatgacgccctacgtttccaagaaccccaggttggcctatttgaactacagggatcttgatattggaatcaacgaccccaaaaacccaaacaactacacccaggcaaggatttggggagagaagtacttcgggaataacttcgacaggctagttaaggtgaaaacgctagttgatccaaataattttttcagaaacgaacagagtatccctcccttaccgcgtcataggcac

SEQ ID NO: 126 - DNA, 1548 bp, Artificial Sequence
  Synthetic
aatccaagagaaaatttcttgaagtgtttttctcagtatatcccgaataatgcgacgaaccttaagttagtatacactcagaacaaccctctatatatgagcgttctaaattctacaatccacaacctaagatttacgtccgacacgactccgaaacccctagttatagtgacaccgtcacatgttagccatatacagggcaccatactatgttccaaaaaagttgggttacaaatacgtacccgtagcgggggacacgacagtgaggggatgagttatattagtcaggtgcctttcgtcatagtggatttaagaaatatgaggtcaattaaaatcgacgttcactcacaaactgcctgggttgaggcgggggccacattgggtgaagtatattactgggtcaatgagaagaacgagaatctttcactagcagccggttattgtcccacagtctgcgccggcggtcactttggcggcggcggatacggtcccttaatgagaaattacgggcttgccgcagacaatatcatagatgctcacttagttaatgttcatggaaaagtgttagaccgtaaaagcatgggggaggatctgttttgggcgcttagagggggaggggcagaatcatttggaataatagtggcatggaaaatcaggcttgtggctgttccaaagagtaccatgttctcagtaaagaaaataatggagatccatgagctagttaaacttgtgaataaatggcaaaacatagcctataaatatgataaggacttgctgcttatgactcatttcataaccagaaacattacggataaccaagggaagaacaaaacagccatccatacctactttagctccgttttcttgggtggtgtagacagcttagttgacctgatgaacaagagttttccggaactaggtatcaagaagacagattgtagacaactttcctggattgataccataatcttttacagcggagtcgtcaattatgacactgacaacttcaacaaggaaattttattagataggagtgcgggtcaaaatggggccttcaagatcaaactagactacgttaaaaaacccattcctgaaagtgtttttgttcagattctggagaagctgtatgaagaagatattggcgcggggatgtacgctctttatccgtacggcggcataatggatgagattagtgaaagcgccatccctttcccccacagagctggtatcctgtacgagttgtggtatatctgctcctgggagtcgcaggaggataacgaaaagcacttaaattggattaggaatatctacaatttcatgacgccctacgtttccaagaaccccaggttggcctatttgaactacagggatcttgatattggaatcaacgaccccaaaaacccaaacaactacacccaggcaaggatttggggagagaagtacttcgggaagaacttcgacaggctagttaaggtgaaaacgctagttgatccaaataattttttcagaaacgaacagagtatccctcccttaccgcgtcataggcac

SEQ ID NO: 127 - DNA, 1548 bp, Artificial Sequence
  Synthetic
aatccaagagaaaatttcttgaagtgtttttctcagtatatcccgaataatgcgacgaaccttaagttagtatacactcagaacaaccctctatatatgagcgttctaaattctacaatccacaacctaagatttacgtccgacacgactccgaaacccctagttatagtgacaccgtcacatgttagccatatacagggcaccatactatgttccaaaaaagttgggttacaaatacgtacccgtagcgggggacacgacagtgaggggatgagttatattagtcaggtgcctttcgtcatagtggatttaagaaatatgaggtcaattaaaatcgacgttcactcacaaactgcctgggttgaggcgggggccacattgggtgaagtatattactgggtcaatgagaagaacgagaatctttcactagcagccggttattgtcccacagtctgcgccggcggtcactttggcggcggcggatacggtcccttaatgagaaattacgggcttgccgcagacaatatcatagatgctcacttagttaatgttcatggaaaagtgttagaccgtaaaagcatgggggaggatctgttttgggcgcttagagggggaggggcagaatcatttggaataatagtggcatggaaaatcaggcttgtggctgttccaaagagtaccatgttctcagtaaagaaaataatggagatccatgagctagttaaacttgtgaataaatggcaaaacatagcctataaatatgataaggacttgctgcttatgactcatttcataaccagaaacattacggataaccaagggaagaacaaaacagccatccatacctactttagctccgttttcttgggtggtgtagacagcttagttgacctgatgaacaagagttttccggaactaggtatcaagaagacagattgtagacaactttcctggattgataccataatcttttacagcggagtcgtcaattatgacactgacaacttcaacaaggaaattttattagataggagtgcgggtcaaaatggggccttcaagatcaaactagactacgttaaaaaacccattcctgaaagtgtttttgttcagattctggagaagctgtatgaagaagaaattggcgcggggatgtacgctctttatccgtacggcggcataatggatgagattagtgaaagcgccatccctttcccccacagagctggtatcctgtacgagttgtggtatatctgctcctgggagaaacaggaggataacgaaaagcacttaaattggattaggaatatctacaatttcatgacgccctacgtttccaagaaccccaggttggcctatttgaactacagggatcttgatattggaatcaacgaccccaaaaacccaaacaactacacccaggcaaggatttggggagagaagtacttcgggaagaacttcgacaggctagttaaggtgaaaacgctagttgatccaaataattttttcagaaacgaacagagtatccctcccttaccgcgtcataggcac

SEQ ID NO: 128 - DNA, 1548 bp, Artificial Sequence
  Synthetic
aatccaagagaaaatttcttgaagtgtttttctcagtatatcccgaataatgcgacgaaccttaagttagtatacactcagaacaaccctctatatatgagcgttctaaattctacaatccacaacctaagatttacgtccgacacgactccgaaacccctagttatagtgacaccgtcacatgttagccatatacagggcaccatactatgttccaaaaaagttgggttacaaatacgtacccgtagcgggggacacgacagtgaggggatgagttatattagtcaggtgcctttcgtcatagtggatttaagaaatatgaggtcaattaaaatcgacgttcactcacaaactgcctgggttgaggcgggggccacattgggtgaagtatattactgggtcaatgagaagaacgagaatctttcactagcagccggttattgtcccacagtctgcgccggcggtcactttggcggcggcggatacggtcccttaatgagaaattacgggcttgccgcagacaatatcatagatgctcacttagttaatgttcatggaaaagtgttagaccgtaaaagcatgggggaggatctgttttgggcgcttagagggggaggggcagaatcatttggaataatagtggcatggaaaatcaggcttgtggctgttccaaagagtaccatgttctcagtaaagaaaataatggagatccatgagctagttaaacttgtgaataaatggcaaaacatagcctataaatatccaaaggacttgctgcttatgactcatttcataaccagaaacattacggataaccaagggaagaacaaaacagccatccatacctactttagctccgttttcttgggtggtgtagacagcttagttgacctgatgaacaagagttttccggaactaggtatcaagaagacagattgtagacaactttcctggattgataccataatcttttacagcggagtcgtcaattatgacactgacaacttcaacaaggaaattttattagataggagtgcgggtcaaaatggggccttcaagatcaaactagactacgttaaaaaacccattcctgaaagtgtttttgttcagattctggagaagctgtatgaagaagatattggcgcggggatgtacgctctttatccgtacggcggcataatggatgagattagtgaaagcgccatccctttcccccacagagctggtatcctgtacgagttgtggtatatctgctcctgggagaaacaggaggataacgaaaagcacttaaattggattaggaatatctacaatttcatgacgccctacgtttccaagaaccccaggttggcctatttgaactacagggatcttgatattggaatcaacgaccccaaaaacccaaacaactacacccaggcaaggatttggggagagaagtacttcgggaagaacttcgacaggctagttaaggtgaaaacgctagttgatccaaataattttttcagaaacgaacagagtatccctcccttaccgcgtcataggcac

SEQ ID NO: 129 - DNA, 1548 bp, Artificial Sequence
  Synthetic
aatccaagagaaaatttcttgaagtgtttttctcagtatatcccgaataatgcgacgaaccttaagttagtatacactcagaacaaccctctatatatgagcgttctaaattctacaatccacaacctaagatttacgtccgacacgactccgaaacccctagttatagtgacaccgtcacatgttagccatatacaggcaaccatactatgttccaaaaaagttgggttacaaatacgtacccgtagcgggggacacgacagtgaggggatgagttatattagtcaggtgcctttcgtcatagtggatttaagaaatatgaggtcaattaaaatcgacgttcactcacaaactgcctgggttgaggcgggggccacattgggtgaagtatattactgggtcaatgagaagaacgagaatctttcactagcagccggttattgtcccacagtctgcgccggcggtcactttggcggcggcggatacggtcccttaatgagaaattacgggcttgccgcagacaatatcatagatgctcacttagttaatgttcatggaaaagtgttagaccgtaaaagcatgggggaggatctgttttgggcgcttagagggggaggggcagaatcatttggaataatagtggcatggaaaatcaggcttgtggctgttccaaagagtaccatgttctcagtaaagaaaataatggagatccatgagctagttaaacttgtgaataaatggcaaaacatagcctataaatatgataaggacttgctgcttatgactcatttcataaccagaaacattacggataaccaagggaagaacaaaacagccatccatacctactttagctccgttttcttgggtggtgtagacagcttagttgacctgatgaacaagagttttccggaactaggtatcaagaagacagattgtagacaactttcctggattgataccataatcttttacagcggagtcgtcaattatgacactgacaacttcaacaaggaaattttattagataggagtgcgggtcaaaatggggccttcaagatcaaactagactacgttaaaaaacccattcctgaaagtgtttttgttcagattctggagaagctgtatgaagaagatattggcgcggggatgtacgctctttatccgtacggcggcataatggatgagattagtgaaagcgccatccctttcccccacagagctggtatcctgtacgagttgtggtatatctgctcctgggagaaacaggaggataacgaaaagcacttaaattggattaggaatatctacaatttcatgacgccctacgtttccaagaaccccaggttggcctatttgaactacagggatcttgatattggaatcaacgaccccaaaaacccaaacaactacacccaggcaaggatttggggagagaagtacttcgggaagaacttcgacaggctagttaaggtgaaaacgctagttgatccaaataattttttcagaaacgaacagagtatccctcccttaccgcgtcataggcac

SEQ ID NO: 130 - DNA, 1548 bp, Artificial Sequence
  Synthetic
aatccaagagaaaatttcttgaagtgtttttctcagtatatcccgaataatgcgacgaaccttaagttagtatacactcagaacaaccctctatatatgagcgttctaaattctacaatccacaacctaagatttacgtccgacacgactccgaaacccctagttatagtgacaccgtcacatgttagccatatacagggcaccatactatgttccaaaaaagttgggttacaaatacgtacccgtagcgggggacacgacagtgaggggatgagttatattagtcaggtgcctttcgtcatagtggatttaagaaatatgaggtcaattaaaatcgacgttcactcacaaactgcctgggttgaggcgggggccacattgggtgaagtatattactgggtcaatgagaagtctgagaatctttcactagcagccggttattgtcccacagtctgcgccggcggtcactttggcggcggcggatacggtcccttaatgagaaattacgggcttgccgcagacaatatcatagatgctcacttagttaatgttcatggaaaagtgttagaccgtaaaagcatgggggaggatctgttttgggcgcttagagggggaggggcagaatcatttggaataatagtggcatggaaaatcaggcttgtggctgttccaaagagtaccatgttctcagtaaagaaaataatggagatccatgagctagttaaacttgtgaataaatggcaaaacatagcctataaatatgataaggacttgctgcttatgactcatttcataaccagaaacattacggataaccaagggaagaacaaaacagccatccatacctactttagctccgttttcttgggtggtgtagacagcttagttgacctgatgaacaagagttttccggaactaggtatcaagaagacagattgtagacaactttcctggattgataccataatcttttacagcggagtcgtcaattatgacactgacaacttcaacaaggaaattttattagataggagtgcgggtcaaaatggggccttcaagatcaaactagactacgttaaaaaacccattcctgaaagtgtttttgttcagattctggagaagctgtatgaagaagatattggcgcggggatgtacgctctttatccgtacggcggcataatggatgagattagtgaaagcgccatccctttcccccacagagctggtatcctgtacgagttgtggtatatctgctcctgggagaaacaggaggataacgaaaagcacttaaattggattaggaatatctacaatttcatgacgccctacgtttccaagaaccccaggttggcctatttgaactacagggatcttgatattggaatcaacgaccccaaaaacccaaacaactacacccaggcaaggatttggggagagaagtacttcgggaagaacttcgacaggctagttaaggtgaaaacgctagttgatccaaataattttttcagaaacgaacagagtatccctcccttaccgcgtcataggcac

SEQ ID NO: 131 - DNA, 1548 bp, Artificial Sequence
  Synthetic
aatccaagagaaaatttcttgaagtgtttttctcagtatatcccgaataatgcgacgaaccttaagttagtatacactcagaacaaccctctatatatgagcgttctaaattctacaatccacaacctaagatttacgtccgacacgactccgaaacccctagttatagtgacaccgtcacatgttagccatatacagggcaccatactatgttccaaaaaagttgggttacaaatacgtacccgtagcgggggacacgacagtgaggggatgagttatattagtcaggtgcctttcgtcatagtggatttaagaaatatgaggtcaattaaaatcgacgttcactcacaaactgcctgggttgaggcgggggccacattgggtgaagtatattactgggtcaatgagaagaacgagaatctttcactagcagccggttattgtcccacagtctgcgccggcggtcactttggcggcggcggatacggtcccttaatgagaaattacgggcttgccgcagacaatatcatagatgctcacttagttaatgttcatggaaaagtgttagaccgtaaaagcatgggggaggatctgttttgggcgcttagagggggaggggcagaatcatttggaataatagtggcatggaaaatcaggcttgtggctgttccaaagagtaccatgttctcagtaaagaaaataatggagatccatgagctagttaaacttgtgaataaatggcaaaacatagcctataaatatgataaggacttgctgcttatgactcatttcataaccagaaacattacggataaccaagggaagaacaaaacagccatccatacctactttagctccgttttcttgggtggtgtagacagcttagttgacctgatgaacaagagttttccggaactaggtatcaagaagacagattgtagacaactttcctggattgataccataatcttttacagcggagtcgtcaattatgacactgacaacttcaacaaggaaattttattagataggagtgcgggtcaaaatggggccttcaagatcaaactagactacgttaaaaaacccattcctgaaagtgtttttgttcagattctggagaagctgtatgaagaagatattggcgcggggatgtacgctctttatccgtacggcggcataatggatgagattagtgaaagcgccatccctttcccccacagagctggtatcctgtacgagttgtggtatatctgctcctgggagaaacaggaggataacgaaaagcacttaaattggattaggaatatctacaatttcatgacgccctacgtttccaagaaccccaggttggcctatttgaactacagggatcttgatattggaactaacgaccccaaaaacccaaacaactacacccaggcaaggatttggggagagaagtacttcgggaagaacttcgacaggctagttaaggtgaaaacgctagttgatccaaataattttttcagaaacgaacagagtatccctcccttaccgcgtcataggcac

SEQ ID NO: 132 - DNA, 1548 bp, Artificial Sequence
  Synthetic
aatccaagagaaaatttcttgaagtgtttttctcagtatatcccgaataatgcgacgaaccttaagttagtatacactcagaacaaccctctatatatgagcgttctaaattctacaatccacaacctaagatttacgtccgacacgactccgaaacccctagttatagtgacaccgtcacatgttagccatatacagggcaccatactatgttccaaaaaagttgggttacaaatacgtacccgtagcgggggacacgacagtgaggggatgagttatattagtcaggtgcctttcgtcatagtggatttaagaaatatgaggtcaattaaaatcgacgttcactcacaaactgcctgggttgaggcgggggccacattgggtgaagtatattactgggtcaatgagaagaacgagaatctttcactagcagccggttattgtcccacagtctgcgccggcggtcactttggcggcggcggatacggtcccttaatgagaaattacgggcttgccgcagacaatatcatagatgctcacttagttaatgttcatggaaaagtgttagaccgtaaaagcatgggggaggatctgttttgggcgcttagagggggaggggcagaatcatttggaataatagtggcatggaaaatcaggcttgtggctgttccaaagagtaccatgttctcagtaaagaaaataatggagatccatgagctagttaaacttgtgaataaatggcaaaacatagcctataaatatgataaggacttgctgcttatgactcatttcataaccagaaacattacggataaccaagggaagaacaaaacagccatccatacctactttagctccgttttcttgggtggtgtagacgaattagttgacctgatgaacaagagttttccggaactaggtatcaagaagacagattgtagacaactttcctggattgataccataatcttttacagcggagtcgtcaattatgacactgacaacttcaacaaggaaattttattagataggagtgcgggtcaaaatggggccttcaagatcaaactagactacgttaaaaaacccattcctgaaagtgtttttgttcagattctggagaagctgtatgaagaagatattggcgcggggatgtacgctctttatccgtacggcggcataatggatgagattagtgaaagcgccatccctttcccccacagagctggtatcctgtacgagttgtggtatatctgctcctgggagaaacaggaggataacgaaaagcacttaaattggattaggaatatctacaatttcatgacgccctacgtttccaagaaccccaggttggcctatttgaactacagggatcttgatattggaatcaacgaccccaaaaacccaaacaactacacccaggcaaggatttggggagagaagtacttcgggaagaacttcgacaggctagttaaggtgaaaacgctagttgatccaaataattttttcagaaacgaacagagtatccctcccttaccgcgtcataggcac

SEQ ID NO: 133 - DNA, 1548 bp, Artificial Sequence
  Synthetic
aatccaagagaaaatttcttgaagtgtttttctcagtatatcccgaataatgcgacgaaccttaagttagtatacactcagaacaaccctctatatatgagcgttctaaattctacaatccacaacctaagatttacgtccgacacgactccgaaacccctagttatagtgacaccgtcacatgttagccatatacagggcaccatactatgttccaaaaaagttgggttacaaatacgtacccgtagcgggggacacgacagtgaggggatgagttatattagtcaggtgcctttcgtcatagtggatttaagaaatatgaggtcaattaaaatcgacgttcactcacaaactgcctgggttgaggcgggggccacattgggtgaagtatattactgggtcaatgagaagaacgagaatctttcactagcagccggttattgtcccacagtctgcgccggcggtcactttggcggcggcggatacggtcccttaatgagaaattacgggcttgccgcagacaatatcatagatgctcacttagttaatgttcatggaaaagtgttagaccgtaaaagcatgggggaggatctgttttgggcgcttagagggggaggggcagaatcatttggaataatagtggcatggaaaatcaggcttgtggctgttccaaagagtaccatgttctcagtaaagaaaataatggagatccatgagctagttaaacttgtgaataaatggcaaaacatagcctataaatatgataaggacttgctgcttatgactcatttcataaccagaaacattacggataaccaagggaagaacaaaacagccatccatacctactttagctccgttttcttgggtggtgtagacagcttagttgacctgatgaacaagagttttccggaactaggtatcaagaagacagattgtagacaactttcctggattgataccataatcttttacagcggagtcgtcaattatgacactgacaacttcaacaaggaaattttattagataggagtgcgggtcaaaatggggccttcaagatcaaactagactacgttaaaaaacccattcctgaagaagtttttgttcagattctggagaagctgtatgaagaagatattggcgcggggatgtacgctctttatccgtacggcggcataatggatgagattagtgaaagcgccatccctttcccccacagagctggtatcctgtacgagttgtggtatatctgctcctgggagaaacaggaggataacgaaaagcacttaaattggattaggaatatctacaatttcatgacgccctacgtttccaagaaccccaggttggcctatttgaactacagggatcttgatattggaatcaacgaccccaaaaacccaaacaactacacccaggcaaggatttggggagagaagtacttcgggaagaacttcgacaggctagttaaggtgaaaacgctagttgatccaaataattttttcagaaacgaacagagtatccctcccttaccgcgtcataggcac

SEQ ID NO: 134 - DNA, 1548 bp, Artificial Sequence
  Synthetic
aatccaagagaaaatttcttgaagtgtttttctcagtatatcccgaataatgcgacgaaccttaacttagtatacactcagaacaaccctctatatatgagcgttctaaattctacaatccacaacctaagatttacgtccgacacgactccgaaacccctagttatagtgacaccgtcacatgttagccatatacagggcaccatactatgttccaaaaaagttgggttacaaatacgtacccgtagcgggggacacgacagtgaggggatgagttatattagtcaggtgcctttcgtcatagtggatttaagaaatatgaggtcaattaaaatcgacgttcactcacaaactgcctgggttgaggcgggggccacattgggtgaagtatattactgggtcaatgagaagaacgagaatctttcactagcagccggttattgtcccacagtctgcgccggcggtcactttggcggcggcggatacggtcccttaatgagaaattacgggcttgccgcagacaatatcatagatgctcacttagttaatgttcatggaaaagtgttagaccgtaaaagcatgggggaggatctgttttgggcgcttagagggggaggggcagaatcatttggaataatagtggcatggaaaatcaggcttgtggctgttccaaagagtaccatgttctcagtaaagaaaataatggagatccatgagctagttaaacttgtgaataaatggcaaaacatagcctataaatatgataaggacttgctgcttatgactcatttcataaccagaaacattacggataaccaagggaagaacaaaacagccatccatacctactttagctccgttttcttgggtggtgtagacagcttagttgacctgatgaacaagagttttccggaactaggtatcaagaagacagattgtagacaactttcctggattgataccataatcttttacagcggagtcgtcaattatgacactgacaacttcaacaaggaaattttattagataggagtgcgggtcaaaatggggccttcaagatcaaactagactacgttaaaaaacccattcctgaaagtgtttttgttcagattctggagaagctgtatgaagaagatattggcgcggggatgtacgctctttatccgtacggcggcataatggatgagattagtgaaagcgccatccctttcccccacagagctggtatcctgtacgagttgtggtatatctgctcctgggagaaacaggaggataacgaaaagcacttaaattggattaggaatatctacaatttcatgacgccctacgtttccaagaaccccaggttggcctatttgaactacagggatcttgatattggaatcaacgaccccaaaaacccaaacaactacacccaggcaaggatttggggagagaagtacttcgggaagaacttcgacaggctagttaaggtgaaaacgctagttgatccaaataattttttcagaaacgaacagagtatccctcccttaccgcgtcataggcac

SEQ ID NO: 135 - DNA, 81 bp, Artificial Sequence
  Synthetic
aactgcagcgcgtttagcttttggtttgtgtgcaaaattatttttttttttctgagctttcatattcagattagcattgcg

SEQ ID NO: 136 - protein, 516 aa, Artificial Sequence
  Synthetic
NPRENFLKCFSQYIPNNATNLKLVYTQNNPLYMSVLNSTIHNLRFTSDTTPKPLVIVTPSHVSHIQGTILCSKKVGLQIRTRSGGHDSEGMSYISQVPFVIVDLRNMRSIKIDVHSQTAWVEAGATLGEVYYWVNEKNENLSLAAGYCPTVCAGGHFGGGGYGPLMRNYGLAADNIIDAHLVNVHGKVLDRKSMGEDLFWALRGGGAESFGIIVAWKIRLVAVPKSTMFSVKKIMEIHELVKLVNKWQNIAYKYDKDLLLMTHFITRNITDNQGKNKTAIHTYFSSVFLGGVDSLVDLMNKSFPELGIKKTDCRQLSWIDTIIFYSGVVNYDTDNFNKEILLDRSAGQNGAFKIKLDYVKKPIPESVFVQILEKLYEEDIGAGMYALYPYGGIMDEISESAIPFPHRAGILYELWYICSWEKQEDNEKHLNWIRNIYNFMTPYVSKNPRLAYLNYRDLDIGINDPKNPNNYTQARIWGEKYFGKNFDRLVKVKTLVDPNNFFRNEQSIPPLPRHRH

SEQ ID NO: 137 - protein, 518 aa, Artificial Sequence
  Synthetic
ANPRENFLKCFSKHIPNNVANPKLVYTQHDQLYMSILNSTIQNLRFISDTTPKPLVIVTPSNNSHIQATILCSKKVGLQIRTRSGGHDAEGMSYISQVPFVVVDLRNMHSIKIDVHSQTAWVEAGATLGEVYYWINEKNENLSFPGGYCPTVGVGGHFSGGGYGALMRNYGLAADNIIDAHLVNVDGKVLDRKSMGEDLFWAIRGGGGENFGIIAAWKIKLVAVPSKSTIFSVKKNMEIHGLVKLFNKWQNIAYKYDKDLVLMTHFITKNITDNHGKNKTTVHGYFSSIFHGGVDSLVDLMNKSFPELGIKKTDCKEFSWIDTTIFYSGVVNFNTANFKKEILLDRSAGKKTAFSIKLDYVKKPIPETAMVKILEKLYEEDVGAGMYVLYPYGGIMDKISESTIPFPHRAGIMYEVWYICSWEKQEDNEKHLNWIRNIYNFMTPYVSKNPRLAYLNYRDLDIGINDPKNPNNYTQARIWGEKYFGKNFDRLVKVKTLVDPNNFFRNEQSIPPLPRHRH

SEQ ID NO: 138 - protein, 517 aa, Artificial Sequence
  Synthetic
NPQENFLKCFSEYIPNNPANPKFIYTQHDQLYMSVLNSTIQNLRFTSDTTPKPLVIVTPSNVSHIQASILCSKKIGLQIRTRSGGHDSEGMSYISQVPFVVVDLRNMHSIKIDVHSQTAWVEAGATLGEVYYWINEKNENLSFPGGYCPTVGVGGHFSGGGYGALMRNYGLAADNIIDAHLVNVDGKVLDRKSMGEDLFWAIRGGGGENFGIIAAWKIKLVAVPSKSTIFSVKKNMEIHGLVKLFNKWQNIAYKYDKDLVLMTHFITKNITDNHGKNKTTVHGYFSSIFHGGVDSLVDLMNKSFPELGIKKTDCKEFSWIDTTIFYSGVVNFNTANFKKEILLDRSAGKKTAFSIKLDYVKKPIPETAMVKILEKLYEEDVGAGMYVLYPYGGIMEEISESAIPFPHRAGIMYELWYTASWEKQEDNEKHINWVRSVYNFTTPYVSQNPRLAYLNYRDLDLGKTNHASPNNYTQARIWGEKYFGKNFNRLVKVKTKVDPNNFFRNEQSIPPLPLHHH

SEQ ID NO: 139 - protein, 518 aa, Artificial Sequence
  Synthetic
ANPQENFLKCFSQYIPTNVTNAKLVYTQHDQFYMSILNSTIQNLRFTSDTTPKPLVIITPLNVSHIQGTILCSKKVGLQIRTRSGGHDAEGMSYISQVPFVVVDLRNMHSIKIDVHSQTAWVEAGATLGEVYYWINENNENLSFPAGYCPTVGAGGHFSGGGYGALMRNYGLAADNIIDAQLVNVDGKVLDRKSMGEDLFWAIRGGGGENFGIIAAWKIRLVAVPSMSTIFSVKKNMEIHELVKLVNKWQNIAYMYEKELLLFTHFITRNITDNQGKNKTTIHSYFSSIFHGGVDSLVDLMNKSFPELGIKKTDCKQLSWIDTIIFYSGLVNYNTTNFKKEILLDRSGGRKAAFSIKLDYVKKPIPESVFVQILEKLYEEDIGAGMYALYPYGGIMDEISESAIPFPHRAGILYELWYICSWEKQEDNEKHLNWIRNIYNFMTPYVSKNPRLAYLNYRDLDIGINDPKNPNNYTQARIWGEKYFGKNFDRLVKVKTLVDPNNFFRNEQSIPPLPRHRH

SEQ ID NO: 140 - protein, 517 aa, Artificial Sequence
  Synthetic
NPRENFLKCFSKHIPNNVANPKLVYTQHDQLYMSILNSTIQNLRFISDTTPKPLVIVTPSNNSHIQATILCSKKVGLQIRTRSGGHDAEGMSYISQVPFVVVDLRNMHSIKIDVHSQTAWVEAGATLGEVYYWINEKNENLSFPGGYCPTVGVGGHFSGGGYGALMRNYGLAADNIIDAHLVNVDGKVLDRKSMGEDLFWAIRGGGGENFGIIAAWKIKLVAVPSKSTIFSVKKNMEIHGLVKLFNKWQNIAYKYDKDLLLMTHFITKNITDNHGKNKTTVHGYFSSIFHGGVDSLVDLMNKSFPELGIKKTDCKEFSWIDTTIFYSGVVNFNTANFKKEILLDRSAGKKTAFSIKLDYVKKPIPETAMVKILEKLYEEDVGAGMYVLYPYGGIMEEISESAIPFPHRAGIMYELWYTASWEKQEDNEKHINWVRSVYNFTTPYVSQNPRLAYLNYRDLDLGKTNHASPNNYTQARIWGEKYFGKNFNRLVKVKTKVDPNNFFRNEQSIPPLPPHHH

SEQ ID NO: 141 - protein, 517 aa, Artificial Sequence
  Synthetic
NPRENFLKCFSKHIPNNVANPKLVYTQHDQLYMSILNSTIQNLRFISDTTPKPLVIVTPSNNSHIQATILCSKKVGLQIRTRSGGHDAEGMSYISQVPFVVVDLRNMHSIKIDVHSQTAWVEAGATLGEVYYWINEKNENLSFPGGYCPTVGVGGHFSGGGYGALMRNYGLAADNIIDAHLVNVDGKVLDRKSMGEDLFWAIRGGGGENFGIIAAWKIKLVAVPSKSTIFSVKKNMEIHGLVKLFNKWQNIAYKYDKDLVLMTHFITKNITDNHGKNKTTVHGYFSSIFHGGVDSLVDLMNKSFPELGIKKTDCKEFSWIDTTIFYSGVVNFNTANFKKEILLDRSAGKKTAFSIKLDYVKKPIPETAMVKILEKLYEEDVGAGMYVLYPYGGIMEEISESAIPFPHRAGIMYELWYTASWEKQEDNEKHINWVRSVYNFTTPYVSQNPRLAYLNYRDLDLGKTNHASPNNYTQARIWGEKYFGKNFNRLVKVKTKVDPNNFFRNEQSIPPLPPHHH

SEQ ID NO: 142 - protein, 517 aa, Artificial Sequence
  Synthetic
NPRENFLKCFSKHIPNNVANPKLVYTQHDQLYMSLLNSTIQNLRFISDTTPKPLVIVTPSNNSHIQATILCSKKVGLQIRTRSGGHDAEGMSYISQVPFVVVDLRNMHSIKIDVHSQTAWVEAGATLGEVYYWINENNENLSFPAGYCPTVGAGGHFSGGGYGALMRNYGLAADNIIDAQLVNVDGKVLDRKSMGEDLFWAIRGGGGENFGIIAAWKIRLVAVPSMSTIFSVKKNMEIHELVKLVNKWQNIAYMYEKELLLFTHFITRNITDNQGKNKTTIHSYFSSIFHGGVDSLVDLMNKSFPELGIKKTDCKQLSWIDTIIFYSGLVNYNTTNFKKEILLDRSGGRKAAFSIKLDYVKKPIPETAMVKILEKLYEEDVGVGMYVLYPYGGIMEEISESAIPFPHRAGIMYELWYTASWEKQEDNEKHINWVRSVYNFTTPYVSQNPRLAYLNYRDLDLGKTNPESPNNYTQARIWGEKYFGKNFNRLVKVKTKADPNNFFRNEQSIPPLPPHHH

SEQ ID NO: 143 - protein, 516 aa, Artificial Sequence
  Synthetic
NPRENFLKCFSQYIPNNATNLKLVYTQNNPLYMSVLNSTIQNLRFTSDTTPKPLVIVTPSHVSHIQGTILCSKKVGLQIRTRSGGHDSEGMSYISQVPFVIVDLRNMRSIKIDVHSQTAWVEAGATLGEVYYWVNEKNENLSLAAGYCPTVCAGGHFGGGGYGPLMRNYGLAADNIIDAHLVNVHGKVLDRKSMGEDLFWALRGGGAESFGIIVAWKIRLVAVPKSTMFSVKKIMEIHELVKLVNKWQNIAYKYDKDLLLMTHFITRNITDNQGKNKTAIHTYFSSVFLGGVDSLVDLMNKSFPELGIKKTDCRQLSWIDTIIFYSGVVNYDTDNFNKEILLDRSAGQNGAFKIKLDYVKKPIPESVFVQILEKLYEEDIGAGMYALYPYGGIMDEISESAIPFPHRAGILYELWYICSWEKQEDNEKHLNWIRNIYNFMTPYVSKNPRLAYLNYRDLDIGINDPKNPNNYTQARIWGEKYFGKNFDRLVKVKTLVDPNNFFRNEQSIPPLPRHRH

SEQ ID NO: 144 - protein, 517 aa, Artificial Sequence
  Synthetic
NPRENFLKCFSKHIPNNVANPKLVYTQHDQLYMSILNSTIQNLRFISDTTPKPLVIVTPSDNSHIQATILCSKKVGLQIRTRSGGHDAEGMSYISQVPFVVVDLRNMHSIKIDVHSQTAWVEAGATLGEVYYWINEKNENLSFPGGYCPTVGVGGHFSGGGYGALMRNYGLAADNIIDAHLVNVDGKVLDRKSMGEDLFWAIRGGGGENFGIIAAWKIKLVAVPSKSTIFSVKKNMEIHGLVKLFNKWQNIAYKYDKDLVLMTHFITKNITDNHGKNKTTVHGYFSSIFHGGVDSLVDLMNKSFPELGIKKTDCKEFSWIDTTIFYSGVVNFNTANFKKEILLDRSAGKKTAFSIKLDYVKKPIPETAMVKILEKLYEEDVGAGMYVLYPYGGIMEEISESAIPFPHRAGIMYELWYTASWEKQEDNEKHINWVRSVYNFTTPYVSQNPRLAYLNYRDLDLGKTNHASPNNYTQARIWGEKYFGKNFNRLVKVKTKVDPNNFFRNEQSIPPLPPHHH

SEQ ID NO: 145 - protein, 517 aa, Artificial Sequence; identical to SEQ ID NO: 138
  Synthetic

SEQ ID NO: 146 - protein, 517 aa, Artificial Sequence
  Synthetic
NPQENFLKCFSQYIPTNVTNAKLVYTQHDQFYMSILNSTIQNLRFTSDTTPKPLVIITPLNVSHIQGTILCSKKVGLQIRTRSGGHDAEGMSYISQVPFVVVDLRNMHSIKIDVHSQTAWVEAGATLGEVYYWINENNENLSFPAGYCPTVGAGGHFSGGGYGALMRNYGLAADNIIDAQLVNVDGKVLDRKSMGEDLFWAIRGGGGENFGIIAAWKIRLVAVPSMSTIFSVKKNMEIHELVKLVNKWQNIAYMYEKELLLFTHFITRNITDNQGKNKTTIHSYFSSIFHGGVDSLVDLMNKSFPELGIKKTDCKQLSWIDTIIFYSGLVNYNTTNFKKEILLDRSGGRKAAFSIKLDYVKKPIPETAMVKILEKLYEEDVGVGMYVLYPYGGIMEEISESAIPFPHRAGIMYELWYTASWEKQEDNEKHINWVRSVYNFTTPYVSQNPRLAYLNYRDLDLGKTNPESPNNYTQARIWGEKYFGKNFNRLVKVKTKADPNNFFRNEQSIPPLPPHHH

SEQ ID NO: 147 - protein, 517 aa, Artificial Sequence; identical to SEQ ID NO: 146
  Synthetic

SEQ ID NO: 148 - protein, 517 aa, Artificial Sequence; identical to SEQ ID NO: 142
  Synthetic

SEQ ID NO: 149 - protein, 516 aa, Artificial Sequence
  Synthetic
NPRENFLKCFSQYIPNNATNLKLVYTQNNPLYMSVLNSTIRNLRFTSDTTPKPLVIVTPSHVSHIQGTILCSKKVGLQIRTRSGGHDSEGMSYISQVPFVIVDLRNMRSIKIDVHSQTAWVEAGATLGEVYYWVNEKNENLSLAAGYCPTVCAGGHFGGGGYGPLMRNYGLAADNIIDAHLVNVHGKVLDRKSMGEDLFWALRGGGAESFGIIVAWKIRLVAVPKSTMFSVKKIMEIHELVKLVNKWQNIAYKYDKDLLLMTHFITRNITDNQGKNKTAIHTYFSSVFLGGVDSLVDLMNKSFPELGIKKTDCRQLSWIDTIIFYSGVVNYDTDNFNKEILLDRSAGQNGAFKIKLDYVKKPIPESVFVQILEKLYEEDIGAGMYALYPYGGIMDEISESAIPFPHRAGILYELWYICSWEKQEDNEKHLNWIRNIYNFMTPYVSKNPRLAYLNYRDLDIGINDPKNPNNYTQARIWGEKYFGKNFDRLVKVKTLVDPNNFFRNEQSIPPLPRHRH

SEQ ID NO: 150 - protein, 517 aa, Artificial Sequence
  Synthetic
NPRENFLKCFSKHIPNNVANPKLVYTQHDQLYMSLLNSTIQNLRFISDTTPKPLVIVTPSNNSHIQATILCSKKVGLQIRTRSGGHDAEGMSYISQVPFVVVDLRNMHSIKIDVHSQTAWVEAGATLGEVYYWINEKNENLSFPGGYCPTVGVGGHFSGGGYGALMRNYGLAADNIIDAHLVNVDGKVLDRKSMGEDLFWAIRGGGGENFGIIAAWKIKLVAVPSKSTIFSVKKNMEIHGLVKLFNKWQNIAYKYDKDLVLMTHFITKNITDNHGKNKTTVHGYFSSIFHGGVDSLVDLMNKSFPELGIKKTDCKEFSWIDTTIFYSGVVNFNTANFKKEILLDRSAGKKTAFSIKLDYVKKPIPETAMVKILEKLYEEDVGAGMYVLYPYGGIMEEISESAIPFPHRAGIMYEIWYIASWEKQEDNEKHINWIRNVYNFTTPYVSQNPRMAYLNYRDLDLGKTNFESPNNYTQARIWGEKYFGKNFNRLVKVKTKVDPDNFFRNEQSIPPLPLRHH

SEQ ID NO: 151 - protein, 516 aa, Artificial Sequence
  Synthetic
NPRENFLKCFSQYIPNNATNLKLVYTQNNPLYMSVLNSTIHNLRFTSDTTPKPLVIVTPSHVSHIQGTILCSKKVGLQIRTRSGGHDSEGMSYISQVPFVIVDLRNMRSIKIDVHSQTAWVEAGATLGEVYYWVNEKNENLSLAAGYCPTVCAGGHFGGGGYGPLMRNYGLAADNIIDAHLVNVHGKVLDRKSMGEDLFWALRGGGAESFGIIVAWKIRLVAVPKSTMFSVKKIMEIHELVKLVNKWQNIAYKYDKDLLLMTHFITRNITDNQGKNKTAIHTYFSSVFLGGVDSLVDLMNKSFPELGIKKTDCRQLSWIDTIIFYSGVVNYDTDNFNKEILLDRSAGQNGAFKIKLDYVKKPIPESVFVQILEKLYEEDIGTGMYALYPYGGIMDEISESAIPFPHRAGILYELWYICSWEKQEDNEKHLNWIRNIYNFMTPYVSKNPRLAYLNYRDLDIGINDPKNPNNYTQARIWGEKYFGKNFDRLVKVKTLVDPNNFFRNEQSIPPLPRHRH

SEQ ID NO: 152 - protein, 516 aa, Artificial Sequence
  Synthetic
NPRENFLKCFSQYIPNNATNLKLVYTQNNPLYMSVLNSTIHNLRFTSDTTPKPLVIVTPSHVSHIQGTILCSKKVGLQIRTRSGGHDSEGMSYISQVPFVIVDLRNMRSIKIDVHSQTAWVEAGATLGEVYYWVNEKNENLSLAAGYCPTVCAGGHFGGGGYGPLMRNYGLAADNIIDAHLVNVHGKVLDRKSMGEDLFWALRGGGAESFGIIVAWKIRLVAVPKSTMFSVKKIMEIHELVKLVNKWQNIAYKYDKDLLLMTHFITRNITDNQGKNKTAIHTYFSSVFLGGVDSLVDLMNKSFPELGIKKTDCRQLSWIDTIIFYSGVVNYDTDNFNKEILLDRSAGQNGAFKIKLDYVKKPIPESVFVQILEKLYEEDIGVGMYALYPYGGIMDEISESAIPFPHRAGILYELWYICSWEKQEDNEKHLNWIRNIYNFMTPYVSKNPRLAYLNYRDLDIGINDPKNPNNYTQARIWGEKYFGKNFDRLVKVKTLVDPNNFFRNEQSIPPLPRHRH

SEQ ID NO: 153 - protein, 516 aa, Artificial Sequence
  Synthetic
NPRENFLKCFSQYIPNNATNLKLVYTQNNPLYMSVLNSTIHNLRFTSDTTPKPLVIVTPSHVSHIQGTILCSKKVGLQIRTRSGGHDSEGMSYISQVPFVIVDLRNMRSIKIDVHSQTAWVEAGATLGEVYYWVNEKNENLSLAAGYCPTVCAGGHFGGGGYGPLMRNYGLAADNIIDAHLVNVHGKVLDRKSMGEDLFWALRGGGAESFGIIVAWKIRLVAVPKSTMFSVKKIMEIHELVKLVNKWQNIAYKYDKDLLLMTHFITRNITDNQGKNKTAIHTYFSSVFLGGVDSLVDLMNKSFPELGIKKTDCRQLSWIDTIIFYSGVVNYDTDNFNKEILLDRSAGQNSAFKIKLDYVKKPIPESVFVQILEKLYEEDIGAGMYALYPYGGIMDEISESAIPFPHRAGILYELWYICSWEKQEDNEKHLNWIRNIYNFMTPYVSKNPRLAYLNYRDLDIGINDPKNPNNYTQARIWGEKYFGKNFDRLVKVKTLVDPNNFFRNEQSIPPLPRHRH

SEQ ID NO: 154 - protein, 517 aa, Artificial Sequence; identical to SEQ ID NO: 150
  Synthetic

SEQ ID NO: 155 - protein, 517 aa, Artificial Sequence
  Synthetic
NPQENFLKCFSQYIPTNVTNAKLVYTQHDQFYMSILNSTIQNLRFTSDTTPKPLVIITPLNVSHIQGTILCSKKVGLQIRTRSGGHDAEGMSYISQVPFVVVDLRNMHSIKIDVHSQTAWVEAGATLGEVYYWINEKNENLSFPGGYCPTVGVGGHFSGGGYGALMRNYGLAADNIIDAHLVNVDGKVLDRKSMGEDLFWAIRGGGGENFGIIAAWKIKLVAVPSKSTIFSVKKNMEIHGLVKLFNKWQNIAYKYDKDLVLMTHFITKNITDNHGKNKTTVHGYFSSIFHGGVDSLVDLMNKSFPELGIKKTDCKEFSWIDTTIFYSGVVNFNTANFKKEILLDRSAGKKTAFSIKLDYVKKPIPETAMVKILEKLYEEDVGAGMYVLYPYGGIMEEISESAIPFPHRAGIMYELWYTASWEKQEDNEKHINWVRSVYNFTTPYVSQNPRLAYLNYRDLDLGKTNHASPNNYTQARIWGEKYFGKNFNRLVKVKTKVDPNNFFRNEQSIPPLPLRHH

SEQ ID NO: 156 - protein, 516 aa, Artificial Sequence
  Synthetic
NPRENFLKCFSQYIPNNATNLKLVYTQNNPLYMSVLNSTIHNLRFTSDTTPKPLVIVTPSHVSHIQGTILCSKKVGLQIRTRSGGHDSEGMSYISQVPFVIVDLRNMRSIKIDVHSQTAWVEAGATLGEVYYWVNEKNENLSLAAGYCPTVCAGGHFGGGGYGPLMRNYGLAADNIIDAHLVNVNGKVLDRKSMGEDLFWALRGGGAESFGIIVAWKIRLVAVPKSTMFSVKKIMEIHELVKLVNKWQNIAYKYDKDLLLMTHFITRNITDNQGKNKTAIHTYFSSVFLGGVDSLVDLMNKSFPELGIKKTDCRQLSWIDTIIFYSGVVNYDTDNFNKEILLDRSAGQNGAFKIKLDYVKKPIPESVFVQILEKLYEEDIGAGMYALYPYGGIMDEISESAIPFPHRAGILYELWYICSWEKQEDNEKHLNWIRNIYNFMTPYVSKNPRLAYLNYRDLDIGINDPKNPNNYTQARIWGEKYFGKNFDRLVKVKTLVDPNNFFRNEQSIPPLPRHRH

SEQ ID NO: 157 - protein, 518 aa, Artificial Sequence; identical to SEQ ID NO: 137
  Synthetic

SEQ ID NO: 158 - protein, 517 aa, Artificial Sequence; identical to SEQ ID NO: 141
  Synthetic

SEQ ID NO: 159 - protein, 518 aa, Artificial Sequence; identical to SEQ ID NO: 139
  Synthetic

SEQ ID NO: 160 - protein, 516 aa, Artificial Sequence
  Synthetic
NPRENFLKCFSQYIPNNATNLKLVYTQNNPLYMSVLNSTIHNLRFTSDTTPKPLVIVTPSHVSHIQGTILCSKKVGLQIRTRSGGHDSEGMSYISQVPFVIVDLRNMRSIKIDVHSQTAWVEAGATLGEVYYWVNEKNENLSLAAGYCPTVCAGGHFGGGGYGPLMRNYGLAADNIIDAHLVNVHGKVLDRKSMGEDLFWALRGGGAESFGIIVAWKIRLVAVPKSTMFSVKKIMEIHELVKLVNKWQNIAYKYDKDLLLMTHFITRNITDNQGKNKTAIHTYFSSVFLGGVDSLVDLMNKSFPELGIKKTDCRQLSWIDTIIFYSGVVNYDTDNFNKEILLDRSAGQNTAFKIKLDYVKKPIPESVFVQILEKLYEEDIGAGMYALYPYGGIMDEISESAIPFPHRAGILYELWYICSWEKQEDNEKHLNWIRNIYNFMTPYVSKNPRLAYLNYRDLDIGINDPKNPNNYTQARIWGEKYFGKNFDRLVKVKTLVDPNNFFRNEQSIPPLPRHRH

SEQ ID NO: 161 - protein, 518 aa, Artificial Sequence; identical to SEQ ID NO: 137
  Synthetic

SEQ ID NO: 162 - protein, 518 aa, Artificial Sequence
  Synthetic
ANPRENFLKCFSKHIPNNVANPKLVYTQHDQLYMSLLNSTIQNLRFISDTTPKPLVIVTPSNNSHIQATILCSKKVGLQIRTRSGGHDAEGMSYISQVPFVVVDLRNMHSIKIDVHSQTAWVEAGATLGEVYYWINENNENLSFPAGYCPTVGAGGHFSGGGYGALMRNYGLAADNIIDAQLVNVDGKVLDRKSMGEDLFWAIRGGGGENFGIIAAWKIRLVAVPSMSTIFSVKKNMEIHELVKLVNKWQNIAYMYEKELLLFTHFITRNITDNQGKNKTTIHSYFSSIFHGGVDSLVDLMNKSFPELGIKKTDCKQLSWIDTIIFYSGLVNYNTTNFKKEILLDRSGGRKAAFSIKLDYVKKPIPESVFVQILEKLYEEDIGAGMYALYPYGGIMDEISESAIPFPHRAGILYELWYICSWEKQEDNEKHLNWIRNIYNFMTPYVSKNPRLAYLNYRDLDIGINDPKNPNNYTQARIWGEKYFGKNFDRLVKVKTLVDPNNFFRNEQSIPPLPRHRH

SEQ ID NO: 163 - protein, 516 aa, Artificial Sequence
  Synthetic
NPRENFLKCFSQYIPNNATNLKLVYTQNNPLYMSVLNSTIHNLRFTSDTTPKPLVIVTPSHVSHIQGTILCSKKVGLQIRTRSGGHDSEGMSYISQVPFVIVDLRNMRSIKIDVHSQTAWVEAGATLGEVYYWVNEKNENLSLAAGYCPTVCAGGHFGGGGYGPLMRNYGLAADNIIDAHLVNVHGKVLDRKSMGEDLFWALRGGGAESFGIIVAWKIRLVAVPKSTMFSVKKIMEIHELVKLVNKWQNIAYKYDKDLLLMTHFITRNITDNQGKNKTAIHTYFSSVFLGGVDSLVDLMNKSFPELGIKKEDCRQLSWIDTIIFYSGVVNYDTDNFNKEILLDRSAGQNGAFKIKLDYVKKPIPESVFVQILEKLYEEDIGAGMYALYPYGGIMDEISESAIPFPHRAGILYELWYICSWEKQEDNEKHLNWIRNIYNFMTPYVSKNPRLAYLNYRDLDIGINDPKNPNNYTQARIWGEKYFGKNFDRLVKVKTLVDPNNFFRNEQSIPPLPRHRH

SEQ ID NO: 164 - protein, 517 aa, Artificial Sequence
  Synthetic
NPQENFLKCFSQYIPNNVANPKLVYTQHDQLYMSILNSTIQNLRFTSDTTPKPLVIVTPSNVSHIQATILCSKKVGLQIRTRSGGHDAEGMSYISQVPFVIVDLRNMHSIKIDVHSQTAWVEAGATLGEVYYWINEKNENLSFPGGYCPTVGVGGHFSGGGYGALMRNYGLAADNIIDAHLVNVDGKVLDRKSMGEDLFWAIRGGGGENFGIIAAWKIKLVAVPSKSTIFSVKKNMEIHGLVKLFNKWQNIAYKYDKDLLLMTHFITRNITDNHGKNKTTVHGYFSSIFHGGVDSLVDLMNKSFPELGIKKTDCKELSWIDTTIFYSGVVNYNTANFKKEILLDRSAGKKTAFSIKLDYVKKPIPETAMVKILEKLYEEDVGVGMYVLYPYGGIMDEISESAIPFPHRAGIMYELWYTASWEKQEDNEKHINWVRSVYNFTTPYVSQNPRLAYLNYRDLDLGKTNPESPNNYTQARIWGEKYFGKNFNRLVKVKTKVDPNNFFRNEQSIPPLPPHHH

SEQ ID NO: 165 - protein, 516 aa, Artificial Sequence
  Synthetic
NPRENFLKCFSQYIPNNATNLKLVYTQNNPLYMSVLNSTIHNLRFTSDTTPKPLVIVTPSHVSHIQGTILCSKKVGLQIRTRSGGHDSEGMSYISQVPFVIVDLRNMRSIKIDVHSQTAWVEAGATLGEVYYWVNEKNENLSLAAGYCPTVCAGGHFGGGGYGPLMRNYGLAADNIIDAHLVNVHGKVLDRKSMGEDLFWALRGGGAESFGIIVAWKIRLVAVPKSTMFSVKKIMEIHELVKLVNKWQNIAYKYDKDLLLMTHFITRNITDNQGKNKTAIHTYFSSVFLGDVDSLVDLMNKSFPELGIKKTDCRQLSWIDTIIFYSGVVNYDTDNFNKEILLDRSAGQNGAFKIKLDYVKKPIPESVFVQILEKLYEEDIGAGMYALYPYGGIMDEISESAIPFPHRAGILYELWYICSWEKQEDNEKHLNWIRNIYNFMTPYVSKNPRLAYLNYRDLDIGINDPKNPNNYTQARIWGEKYFGKNFDRLVKVKTLVDPNNFFRNEQSIPPLPRHRH

SEQ ID NO: 166 - protein, 516 aa, Artificial Sequence
  Synthetic
NPRENFLKCFSQYIPNNATNLKLVYTQNNPLYMSVLNSTIHNLRFTSDTTPKPLVIVTPSDVSHIQGTILCSKKVGLQIRTRSGGHDSEGMSYISQVPFVIVDLRNMRSIKIDVHSQTAWVEAGATLGEVYYWVNEKNENLSLAAGYCPTVCAGGHFGGGGYGPLMRNYGLAADNIIDAHLVNVHGKVLDRKSMGEDLFWALRGGGAESFGIIVAWKIRLVAVPKSTMFSVKKIMEIHELVKLVNKWQNIAYKYDKDLLLMTHFITRNITDNQGKNKTAIHTYFSSVFLGGVDSLVDLMNKSFPELGIKKTDCRQLSWIDTIIFYSGVVNYDTDNFNKEILLDRSAGQNGAFKIKLDYVKKPIPESVFVQILEKLYEEDIGAGMYALYPYGGIMDEISESAIPFPHRAGILYELWYICSWEKQEDNEKHLNWIRNIYNFMTPYVSKNPRLAYLNYRDLDIGINDPKNPNNYTQARIWGEKYFGKNFDRLVKVKTLVDPNNFFRNEQSIPPLPRHRH

SEQ ID NO: 167 - protein, 518 aa, Artificial Sequence; identical to SEQ ID NO: 162
  Synthetic

SEQ ID NO: 168 - protein, 516 aa, Artificial Sequence
  Synthetic
NPRENFLKCFSQYIPNNATNLKLVYTQNNPLYMSVLNSTIHNLRFTSDTTPKPLVIVTPSEVSHIQGTILCSKKVGLQIRTRSGGHDSEGMSYISQVPFVIVDLRNMRSIKIDVHSQTAWVEAGATLGEVYYWVNEKNENLSLAAGYCPTVCAGGHFGGGGYGPLMRNYGLAADNIIDAHLVNVHGKVLDRKSMGEDLFWALRGGGAESFGIIVAWKIRLVAVPKSTMFSVKKIMEIHELVKLVNKWQNIAYKYDKDLLLMTHFITRNITDNQGKNKTAIHTYFSSVFLGGVDSLVDLMNKSFPELGIKKTDCRQLSWIDTIIFYSGVVNYDTDNFNKEILLDRSAGQNGAFKIKLDYVKKPIPESVFVQILEKLYEEDIGAGMYALYPYGGIMDEISESAIPFPHRAGILYELWYICSWEKQEDNEKHLNWIRNIYNFMTPYVSKNPRLAYLNYRDLDIGINDPKNPNNYTQARIWGEKYFGKNFDRLVKVKTLVDPNNFFRNEQSIPPLPRHRH

SEQ ID NO: 169 - protein, 516 aa, Artificial Sequence
  Synthetic
NPRENFLKCFSQYIPNNATNLKLVYTQNNPLYMSVLNSTIHNLRFTSDTTPKPLVIVTPSHVSHIQGTILCSKKVGLQIRTRSGGHDSEGMSYISQVPFVIVDLRNMRSIKIDVHSQTAWVEAGATLGEVYYWVNEKNENLSLAAGYCPTVCAGGHFGGGGYGPLMRNYGLAADNIIDAHLVNVHGKVLDRKSMGEDLFWALRGGGAESFGIIVAWKIRLVAVPKSTMFSVKKIMEIHELVKLVNKWQNIAYKYDKDLLLFTHFITRNITDNQGKNKTAIHTYFSSVFLGGVDSLVDLMNKSFPELGIKKTDCRQLSWIDTIIFYSGVVNYDTDNFNKEILLDRSAGQNGAFKIKLDYVKKPIPESVFVQILEKLYEEDIGAGMYALYPYGGIMDEISESAIPFPHRAGILYELWYICSWEKQEDNEKHLNWIRNIYNFMTPYVSKNPRLAYLNYRDLDIGINDPKNPNNYTQARIWGEKYFGKNFDRLVKVKTLVDPNNFFRNEQSIPPLPRHRH

SEQ ID NO: 170 - protein, 516 aa, Artificial Sequence
  Synthetic
NPRENFLKCFSQYIPNNATNLKLVYTQNNPLYMSVLNSTIHNLRFTSDTTPKPLVIVTPSHVSHIQGTILCSKKVGLQIRTRSGGHDSEGMSYISQVPFVIVDLRNMRSIKIDVHSQTAWVEAGATLGEVYYWVNEKNENLSLAAGYCPTVCAGGHFGGGGYGPLMRNYGLAADNIIDAHLVNVHGKVLDRKSMGEDLFWALRGGGAESFGIIVAWKIRLVAVPKSTMFSVKKIMEIHELVKLVNKWQNIAYKYDKDLLLMTHFITRNITDNQGKNKTAIHTYFSSVFLGGVDSLVDLMNKSFPELGIKKTDCRQLSWIDTIIFYSGVVNYDTDNFNKEILLDRSAGQNRAFKIKLDYVKKPIPESVFVQILEKLYEEDIGAGMYALYPYGGIMDEISESAIPFPHRAGILYELWYICSWEKQEDNEKHLNWIRNIYNFMTPYVSKNPRLAYLNYRDLDIGINDPKNPNNYTQARIWGEKYFGKNFDRLVKVKTLVDPNNFFRNEQSIPPLPRHRH

SEQ ID NO: 171 - protein, 516 aa, Artificial Sequence
  Synthetic
NPRENFLKCFSQYIPNNATNLKLVYTQNNPLYMSVLNSTIHNLRFTSDTTPKPLVIVTPSQVSHIQGTILCSKKVGLQIRTRSGGHDSEGMSYISQVPFVIVDLRNMRSIKIDVHSQTAWVEAGATLGEVYYWVNEKNENLSLAAGYCPTVCAGGHFGGGGYGPLMRNYGLAADNIIDAHLVNVHGKVLDRKSMGEDLFWALRGGGAESFGIIVAWKIRLVAVPKSTMFSVKKIMEIHELVKLVNKWQNIAYKYDKDLLLMTHFITRNITDNQGKNKTAIHTYFSSVFLGGVDSLVDLMNKSFPELGIKKTDCRQLSWIDTIIFYSGVVNYDTDNFNKEILLDRSAGQNGAFKIKLDYVKKPIPESVFVQILEKLYEEDIGAGMYALYPYGGIMDEISESAIPFPHRAGILYELWYICSWEKQEDNEKHLNWIRNIYNFMTPYVSKNPRLAYLNYRDLDIGINDPKNPNNYTQARIWGEKYFGKNFDRLVKVKTLVDPNNFFRNEQSIPPLPRHRH

SEQ ID NO: 172 - protein, 516 aa, Artificial Sequence
  Synthetic
NPRENFLKCFSQYIPNNATNLKLVYTQNNPLYMSVLNSTIHNLRFTSDTTPKPLVIVTPSRVSHIQGTILCSKKVGLQIRTRSGGHDSEGMSYISQVPFVIVDLRNMRSIKIDVHSQTAWVEAGATLGEVYYWVNEKNENLSLAAGYCPTVCAGGHFGGGGYGPLMRNYGLAADNIIDAHLVNVHGKVLDRKSMGEDLFWALRGGGAESFGIIVAWKIRLVAVPKSTMFSVKKIMEIHELVKLVNKWQNIAYKYDKDLLLMTHFITRNITDNQGKNKTAIHTYFSSVFLGGVDSLVDLMNKSFPELGIKKTDCRQLSWIDTIIFYSGVVNYDTDNFNKEILLDRSAGQNGAFKIKLDYVKKPIPESVFVQILEKLYEEDIGAGMYALYPYGGIMDEISESAIPFPHRAGILYELWYICSWEKQEDNEKHLNWIRNIYNFMTPYVSKNPRLAYLNYRDLDIGINDPKNPNNYTQARIWGEKYFGKNFDRLVKVKTLVDPNNFFRNEQSIPPLPRHRH

SEQ ID NO: 173 - protein, 516 aa, Artificial Sequence
  Synthetic
NPRENFLKCFSQYIPNNATNLKLVYTQNNPLYMSVLNSTIHNLRFTSDTTPKPLVIVTPSHVSHIQGTILCSKKVGLQIRTRSGGHDSEGMSYISQVPFVIVDLRNMRSIKIDVHSQTAWVEAGATLGEVYYWVNEKNENLSLAAGYCPTVCAGGHFGGGGYGPLMRNYGLAADNIIDAHLVNVHGKVLDRKSMGEDLFWALRGGGAESFGIIVAWKIRLVAVPKSTMFSVKKIMEIHELVKLVNKWQNIAYKYDKDLLLMTHFITRNITDNQGKNKTAIHTYFSSVFLGGVDSLVDLMNKSFPELGIKKTDCRQLSWIDTIIFMSGVVNYDTDNFNKEILLDRSAGQNGAFKIKLDYVKKPIPESVFVQILEKLYEEDIGAGMYALYPYGGIMDEISESAIPFPHRAGILYELWYICSWEKQEDNEKHLNWIRNIYNFMTPYVSKNPRLAYLNYRDLDIGINDPKNPNNYTQARIWGEKYFGKNFDRLVKVKTLVDPNNFFRNEQSIPPLPRHRH

SEQ ID NO: 174 - protein, 516 aa, Artificial Sequence
  Synthetic
NPRENFLKCFSQYIPNNATNLKLVYTQNNPLYMSVLNSTIHNLRFTSDTTPKPLVIVTPSHVSHIQGTILCSKKVGLQIRTRSGGHDSEGMSYISQVPFVIVDLRNMRSIKIDVHSQTAWVEAGATLGEVYYWVNEKNENLSLAAGYCPTVCAGGHFGGGGYGPLMRNYGLAADNIIDAHLVNVHGKVLDRKSMGEDLFWALRGGGAESFGIIVAWKIRLVAVPKSTMFSVKKIMEIHELVKLVNKWQNIAYKYDKDLLLMTHFITRNITDNQGKNKTAIHTYFSSVFLGGVDSLVDLMNKSFPELGIKKTDCRQLSWIDTIIFYSGVVNYDTDNFNKEILLDRSAGQNGAFKSKLDYVKKPIPESVFVQILEKLYEEDIGAGMYALYPYGGIMDEISESAIPFPHRAGILYELWYICSWEKQEDNEKHLNWIRNIYNFMTPYVSKNPRLAYLNYRDLDIGINDPKNPNNYTQARIWGEKYFGKNFDRLVKVKTLVDPNNFFRNEQSIPPLPRHRH

SEQ ID NO: 175 - protein, 516 aa, Artificial Sequence
  Synthetic
NPRENFLKCFSQYIPNNATNLKLVYTQNNPLYMSVLNSTIHNLRFTSDTTPKPLVIVTPSHVSHIQGTILCSKKVGLQIRTRSGGHDSEGMSYISQVPFVIVDLRNMRSIKIDVHSQTAWVEAGATLGEVYYWVNEKNENLSLAAGYCPTVCAGGHFGGGGYGPLMRNYGLAADNIIDAHLVNVHGKVLDRKSMGEDLFWALRGGGAESFGIIVAWKIRLVAVPKSTMFSVKKIMEIHELVKLVNKWQNIAYKYDKDLLLMTHFITRNITDNQGKNKTAIHTYFSSVFLGGVDSLVDLMNKSFPELGIKKTDCRQLSWIDTIIFYSGVVNYDTDNFNKEILLDRSAGQNGAFKIKLDYVKKPIPESVFVQILEKLYEEDIGAGMYILYPYGGIMDEISESAIPFPHRAGILYELWYICSWEKQEDNEKHLNWIRNIYNFMTPYVSKNPRLAYLNYRDLDIGINDPKNPNNYTQARIWGEKYFGKNFDRLVKVKTLVDPNNFFRNEQSIPPLPRHRH

SEQ ID NO: 176 - protein, 516 aa, Artificial Sequence
  Synthetic
NPRENFLKCFSQYIPNNATNLKLVYTQNNPLYMSVLNSTIHNLRFTSDTTPKPLVIVTPSHVSHIQGTILCSKKVGLQIRTRSGGHDSEGMSYISQVPFVIVDLRNMRSIKIDVHSQTAWVEAGATLGEVYYWVNEKNENLSLAAGYCPTVCAGGHFGGGGYGPLMRNYGLAADNIIDAHLVNVHGKVLDRKSMGEDLFWALRGGGAESFGIIVAWKIRLVAVPKSTMFSVKKIMEIHELVKLVNKWQNIAYKYDKDLLLMTHFITRNITDNQGKNKTAIHTYFSSVFLGGVDSLVDLMNKSFPELGIKKTDCRQLSWIDTIIFYSGVVNYDTDNFNKEILLDRSAGQNGAFKIKLDYVKKPIPESVFVQILEKLYEEDIGAGMYLLYPYGGIMDEISESAIPFPHRAGILYELWYICSWEKQEDNEKHLNWIRNIYNFMTPYVSKNPRLAYLNYRDLDIGINDPKNPNNYTQARIWGEKYFGKNFDRLVKVKTLVDPNNFFRNEQSIPPLPRHRH

SEQ ID NO: 177 - protein, 516 aa, Artificial Sequence
  Synthetic
NPRENFLKCFSQYIPNNATNLKLVYTQNNPLYMSVLNSTIHNLRFTSDTTPKPLVIVTPSHVSHIQGTILCSKKVGLQIRTRSGGHDSEGMSYISQVPFVIVDLRNMRSIKIDVHSQTAWVEAGATLGEVYYWVNEKNENLSLAAGYCPTVCAGGHFGGGGYGPLMRNYGLAADNIIDAHLVNVHGKVLDRKSMGEDLFWALRGGGAESFGIIVAWKIRLVAVPKSTMFSVKKIMEIHELVKLVNKWQNIAYKYDKDLLLMTHFITRNITDNQGKNKTAIHTYFSSVFLGGVDSLVDLMNKSFPELGIKKTDCRQLSWIDTIIFYSGVVNYDTDNFNKEILLDRSAGQNGAFKIKLDYVKKPIPESVFVQILEKLYEEDIGAGMYMLYPYGGIMDEISESAIPFPHRAGILYELWYICSWEKQEDNEKHLNWIRNIYNFMTPYVSKNPRLAYLNYRDLDIGINDPKNPNNYTQARIWGEKYFGKNFDRLVKVKTLVDPNNFFRNEQSIPPLPRHRH

SEQ ID NO: 178 - protein, 517 aa, Artificial Sequence
  Synthetic
NPQENFLKCFSQYIPNNATNAKLVYTQNDPLYMSVLNSTIQNLRFTSDTTPKPLVIVTPSNVSHIQGTILCSKKVGLQIRTRSGGHDAEGMSYISQVPFVIVDLRNMRSIKIDVHSQTAWVEAGATLGEVYYWINEKNENLSFPAGYCPTVGAGGHFSGGGYGALMRNYGLAADNIIDAHLVNVDGKVLDRKSMGEDLFWAIRGGGGESFGIIVAWKIRLVAVPSKSTMFSVKKNMEIHELVKLVNKWQNIAYKYDKDLLLMTHFITRNITDNQGKNKTTIHSYFSSIFLGGVDSLVDLMNKSFPELGIKKTDCKQLSWIDTIIFYSGVVNYDTTNFKKEILLDRSAGQNAAFKIKLDYVKKPIPETVMVKILEKLYEEDVGVGMYVLYPYGGIMDEISESAIPFPHRAGIMYELWYIASWEKQEDNEKHLNWIRNVYNFMTPYVSQNPRLAYLNYRDLDLGKNNPKSPNNYTQARIWGEKYFGKNFNRLVKVKTKVDPNNFFRNEQSIPPLPRHRH

SEQ ID NO: 179 - protein, 516 aa, Artificial Sequence
  Synthetic
NPRENFLKCFSQYIPNNATNLKLVYTQNNPLYMSVLNSTIHNLRFTSDTTPKPLVIVTPSHVSHIQGTILCSKKVGLQIRTRSGGHDSEGMSYISQVPFVIVDLRNMRSIKIDVHSQTAWVEAGATLGEVYYWVNEKNENLSLAAGYCPTVCAGGHFGGGGYGPLMRNYGLAADNIIDAHLVNVHGKVLDRKSMGEDLFWALRGGGAESFGIIVAWKIRLVAVPKSTMFSVKKIMEIHELVKLVNKWQNIAYKYDKDLLLMTHFITRNITDNQGKNKTAIHTYFSSVFLGGVDSLVDLMNKSFPELGIKKTDCRQLSWIDTIIFYSGVVNYDTDNFNKEILLDRSAGQNGAFKIKLDYVKKPIPESVFVQILEKLYEEDIGAGMYALFPYGGIMDEISESAIPFPHRAGILYELWYICSWEKQEDNEKHLNWIRNIYNFMTPYVSKNPRLAYLNYRDLDIGINDPKNPNNYTQARIWGEKYFGKNFDRLVKVKTLVDPNNFFRNEQSIPPLPRHRH

SEQ ID NO: 180 - protein, 516 aa, Artificial Sequence
  Synthetic
NPRENFLKCFSQYIPNNATNLKLVYTQNNPLYMSVLNSTIHNLRFTSDTTPKPLVIVTPSHVSHIQGTILCSKKVGLQIRTRSGGHDAEGMSYISQVPFVIVDLRNMRSIKIDVHSQTAWVEAGATLGEVYYWVNEKNENLSLAAGYCPTVCAGGHFGGGGYGPLMRNYGLAADNIIDAHLVNVHGKVLDRKSMGEDLFWALRGGGAESFGIIVAWKIRLVAVPKSTMFSVKKIMEIHELVKLVNKWQNIAYKYDKDLLLMTHFITRNITDNQGKNKTAIHTYFSSVFLGGVDSLVDLMNKSFPELGIKKTDCRQLSWIDTIIFYSGVVNYDTDNFNKEILLDRSAGQNGAFKIKLDYVKKPIPESVFVQILEKLYEEDIGAGMYALYPYGGIMDEISESAIPFPHRAGILYELWYICSWEKQEDNEKHLNWIRNIYNFMTPYVSKNPRLAYLNYRDLDIGINDPKNPNNYTQARIWGEKYFGKNFDRLVKVKTLVDPNNFFRNEQSIPPLPRHRH

SEQ ID NO: 181 - protein, 516 aa, Artificial Sequence
  Synthetic
NPRENFLKCFSQYIPNNATNLKLVYTQNNPLYMSVLNSTIHNLRFTSDTTPKPLVIVTPSHVSHIQGTILCSKKVGLQIRTRSGGHDSEGMSYISQVPFVIVDLRNMRSIKIDVHSQTAWVEAGATLGEVYYWVNEKNENLSLAAGYCPTVCAGGHFGGGGYGPLMRNYGLAADNIIDAHLVNVHGKVLDRKSMGEDLFWALRGGGAESFGIIVAWKIRLVAVPKSTMFSVKKIMEIHELVKLVNKWQNIAYKYDKDLLLWTHFITRNITDNQGKNKTAIHTYFSSVFLGGVDSLVDLMNKSFPELGIKKTDCRQLSWIDTIIFYSGVVNYDTDNFNKEILLDRSAGQNGAFKIKLDYVKKPIPESVFVQILEKLYEEDIGAGMYALYPYGGIMDEISESAIPFPHRAGILYELWYICSWEKQEDNEKHLNWIRNIYNFMTPYVSKNPRLAYLNYRDLDIGINDPKNPNNYTQARIWGEKYFGKNFDRLVKVKTLVDPNNFFRNEQSIPPLPRHRH

SEQ ID NO: 182 - protein, 516 aa, Artificial Sequence
  Synthetic
NPRENFLKCFSQYIPNNATNLKLVYTQNNPLYMSVLNSTIHNLRFTSDTTPKPLVIVTPSHVSHIQGTILCSKKVGLQIRTRSGGHDGEGMSYISQVPFVIVDLRNMRSIKIDVHSQTAWVEAGATLGEVYYWVNEKNENLSLAAGYCPTVCAGGHFGGGGYGPLMRNYGLAADNIIDAHLVNVHGKVLDRKSMGEDLFWALRGGGAESFGIIVAWKIRLVAVPKSTMFSVKKIMEIHELVKLVNKWQNIAYKYDKDLLLMTHFITRNITDNQGKNKTAIHTYFSSVFLGGVDSLVDLMNKSFPELGIKKTDCRQLSWIDTIIFYSGVVNYDTDNFNKEILLDRSAGQNGAFKIKLDYVKKPIPESVFVQILEKLYEEDIGAGMYALYPYGGIMDEISESAIPFPHRAGILYELWYICSWEKQEDNEKHLNWIRNIYNFMTPYVSKNPRLAYLNYRDLDIGINDPKNPNNYTQARIWGEKYFGKNFDRLVKVKTLVDPNNFFRNEQSIPPLPRHRH

SEQ ID NO: 183 - protein, 516 aa, Artificial Sequence
  Synthetic
NPRENFLKCFSQYIPNNATNLKLVYTQNNPLYMSVLNSTIHNLRFTSDTTPKPLVIVTPSHVSHIQGTILCSKKVGLQIRTRSGGHDSEGMSYISQVPFVIVDLRNMRSIKIDVHSQTAWVEAGATLGEVYYWVNEKNENLSLAAGYCPTVCAGGHFGGGGYGPLMRNYGLAADNIIDAHLVNVHGKVLDRKSMGEDLFWALRGGGAESFGIIVAWKIRLVAVPKSTMFSVKKIMEIHELVKLVNKWQNIAYKYDKDLLLMTHFITRNITDNQGKNKTAIHTYFSSVFLGGVDSLVDLMNKSFPELGIKKTDCRQLSWIDTIIFYSGVVNYDTDNFNKEILLDRSAGQNGAFKIKLDYVKKPIPESVFVQILEKLYEEDIGAGMYALIPYGGIMDEISESAIPFPHRAGILYELWYICSWEKQEDNEKHLNWIRNIYNFMTPYVSKNPRLAYLNYRDLDIGINDPKNPNNYTQARIWGEKYFGKNFDRLVKVKTLVDPNNFFRNEQSIPPLPRHRH

SEQ ID NO: 184 - protein, 516 aa, Artificial Sequence
  Synthetic
NPRENFLKCFSQYIPNNATNLKLVYTQNNPLYMSVLNSTIHNLRFTSDTTPKPLVIVTPSHVSHIQGTILCSKKVGLQIRTRSGGHDSEGMSYISQVPFVIVDLRNMRSIKIDVHSQTAWVEAGATLGEVYYWVNEKNENLSLAAGYCPTVCAGGHFGGGGYGPLMRNYGLAADNIIDAHLVNVHGKVLDRKSMGEDLFWALRGGGAESFGIIVAWKIRLVAVPKSTMFSVKKIMEIHELVKLVNKWQNIAYKYDKDLLLMTHFITRNITDNQGKNKTAIHTYFSSVFLGGVDSLVDLMNKSFPELGIKKTDCRQLSWIDTIIFYSGVVNYDTDNFNKEILLDRSAGQNGAFKIKLDYVKKPIPESVFVQILEKLYEEDIGAGMYALMPYGGIMDEISESAIPFPHRAGILYELWYICSWEKQEDNEKHLNWIRNIYNFMTPYVSKNPRLAYLNYRDLDIGINDPKNPNNYTQARIWGEKYFGKNFDRLVKVKTLVDPNNFFRNEQSIPPLPRHRH

SEQ ID NO: 185 - protein, 516 aa, Artificial Sequence
  Synthetic
NPRENFLKCFSQYIPNNATNLKLVYTQNNPLYMSVLNSTIHNLRFTSDTTPKPLVIVTPSHVSHIQGTILCSKKVGLQIRTRSGGHDSEGMSYISQVPFVIVDLRNMRSIKIDVHSQTAWVEAGATLGEVYYWVNEKNETLSLAAGYCPTVCAGGHFGGGGYGPLMRNYGLAADNIIDAHLVNVHGKVLDRKSMGEDLFWALRGGGAESFGIIVAWKIRLVAVPKSTMFSVKKIMEIHELVKLVNKWQNIAYKYDKDLLLMTHFITRNITDNQGKNKTAIHTYFSSVFLGGVDSLVDLMNKSFPELGIKKTDCRQLSWIDTIIFYSGVVNYDTDNFNKEILLDRSAGQNGAFKIKLDYVKKPIPESVFVQILEKLYEEDIGAGMYALYPYGGIMDEISESAIPFPHRAGILYELWYICSWEKQEDNEKHLNWIRNIYNFMTPYVSKNPRLAYLNYRDLDIGINDPKNPNNYTQARIWGEKYFGKNFDRLVKVKTLVDPNNFFRNEQSIPPLPRHRH

SEQ ID NO: 186 - protein, 516 aa, Artificial Sequence
  Synthetic
NPRENFLKCFSQYIPNNATNLKLVYTQNNPLYMSVLNSTIHNLRFTSDTTPKPLVIVTPSHVSHIQGTILCSKKVGLQIRTRSGGHDSEGMSYISQVPFVIVDLRNMRSIKIDVESQTAWVEAGATLGEVYYWVNEKNENLSLAAGYCPTVCAGGHFGGGGYGPLMRNYGLAADNIIDAHLVNVHGKVLDRKSMGEDLFWALRGGGAESFGIIVAWKIRLVAVPKSTMFSVKKIMEIHELVKLVNKWQNIAYKYDKDLLLMTHFITRNITDNQGKNKTAIHTYFSSVFLGGVDSLVDLMNKSFPELGIKKTDCRQLSWIDTIIFYSGVVNYDTDNFNKEILLDRSAGQNGAFKIKLDYVKKPIPESVFVQILEKLYEEDIGAGMYALYPYGGIMDEISESAIPFPHRAGILYELWYICSWEKQEDNEKHLNWIRNIYNFMTPYVSKNPRLAYLNYRDLDIGINDPKNPNNYTQARIWGEKYFGKNFDRLVKVKTLVDPNNFFRNEQSIPPLPRHRH

SEQ ID NO: 187 - protein, 516 aa, Artificial Sequence
  Synthetic
NPRENFLKCFSQYIPNNATNLKLVYTQNNPLYMSVLNSTIHNLRFTSDTTPKPLVIVTPSHVSHIQGTILCSKKVGLEIRTRSGGHDSEGMSYISQVPFVIVDLRNMRSIKIDVHSQTAWVEAGATLGEVYYWVNEKNENLSLAAGYCPTVCAGGHFGGGGYGPLMRNYGLAADNIIDAHLVNVHGKVLDRKSMGEDLFWALRGGGAESFGIIVAWKIRLVAVPKSTMFSVKKIMEIHELVKLVNKWQNIAYKYDKDLLLMTHFITRNITDNQGKNKTAIHTYFSSVFLGGVDSLVDLMNKSFPELGIKKTDCRQLSWIDTIIFYSGVVNYDTDNFNKEILLDRSAGQNGAFKIKLDYVKKPIPESVFVQILEKLYEEDIGAGMYALYPYGGIMDEISESAIPFPHRAGILYELWYICSWEKQEDNEKHLNWIRNIYNFMTPYVSKNPRLAYLNYRDLDIGINDPKNPNNYTQARIWGEKYFGKNFDRLVKVKTLVDPNNFFRNEQSIPPLPRHRH

SEQ ID NO: 188 - protein, 516 aa, Artificial Sequence
  Synthetic
NPRENFLKCFSQYIPNNATNLKLVYTQNNPLYMSVLNSTIHNLRFTSDTTPKPLVIVTPSHVSHIQGTILCSKKVGLQIRTRSGGHDSEGMSYISQVPFVIVDLRNMRSIKIDVHSQTAWVEAGATLGEVYYWVNEKNENLSLAAGYCPTVCAGGHFGGGGYGPLMRNYGLAADNIIDAHLVNVHGKVLDRKSMGEDLFWALRGGGAESFGIIVAWKIRLVAVPKSTMFSVKKIMEIHELVKLVNKWQNIAYKYDKDLLLMTHFITRNITDNQGKNKTAIHTYFSSVFLGGVDSLVDLMNKSFPELGIKKTDCRQMSWIDTIIFYSGVVNYDTDNFNKEILLDRSAGQNGAFKIKLDYVKKPIPESVFVQILEKLYEEDIGAGMYALYPYGGIMDEISESAIPFPHRAGILYELWYICSWEKQEDNEKHLNWIRNIYNFMTPYVSKNPRLAYLNYRDLDIGINDPKNPNNYTQARIWGEKYFGKNFDRLVKVKTLVDPNNFFRNEQSIPPLPRHRH

SEQ ID NO: 189 - protein, 516 aa, Artificial Sequence
  Synthetic
NPRENFLKCFSQYIPNNATNLKLVYTQNNPLYMSVLNSTIHNLRFTSDTTPKPLVIVTPSHVSHIQGTILCSKKVGLQIRTRSGGHDSEGMSYISQVPFVIVDLRNMRSIKIDVHSQTAWVEAGATLGEVYYWVNEKNENLSLAAGYCPTVCAGGHFGGGGYGPLMRNYGLAADNIIDAHLVNVHGKVLDRKSMGEDLFWALRGGGAESFGIIVAWKIRLVAVPKSTMFSVKKIMEIHELVKLVNKWQNIAYKYDKDLLLMTHFITRNITDNQGKNKTAIHTYFSSVFLGGVDSLVDLMNKSFPELGIKKTDCRQLSWIDTIIFYSGVVNYDTDNFNKEILLDRSAGLNGAFKIKLDYVKKPIPESVFVQILEKLYEEDIGAGMYALYPYGGIMDEISESAIPFPHRAGILYELWYICSWEKQEDNEKHLNWIRNIYNFMTPYVSKNPRLAYLNYRDLDIGINDPKNPNNYTQARIWGEKYFGKNFDRLVKVKTLVDPNNFFRNEQSIPPLPRHRH

SEQ ID NO: 190 - protein, 516 aa, Artificial Sequence
  Synthetic
NPRENFLKCFSQYIPNNATNLKLVYTQNNPLYMSVLNSTIHNLRFTSDTTPKPLVIVTPSHVSHIQGTILCSKKVGLQIRTRSGGHDSEGMSYISQVPFVIVDLRNMRSIKIDVHSQTAWVEAGATLGEVYYWVNEKNENLSLAAGYCPTVCAGGHFGGGGYGPLMRNYGLAADNIIDAHLVNVHGKVLDRKSMGEDLFWALRGGGAESFGIIVAWKIRLVAVPKSTMFSVKKIMEIHELVKLVNKWQNIAYKYDKDLLLMTHFITRNITDNQGKNKTAIHTYFSSVFLGGVDSLVDLMNKSFPELGIKKTDCRQLSWIDTIIFYSGVVNYDTDNFNKEILLDRSAGYNGAFKIKLDYVKKPIPESVFVQILEKLYEEDIGAGMYALYPYGGIMDEISESAIPFPHRAGILYELWYICSWEKQEDNEKHLNWIRNIYNFMTPYVSKNPRLAYLNYRDLDIGINDPKNPNNYTQARIWGEKYFGKNFDRLVKVKTLVDPNNFFRNEQSIPPLPRHRH

SEQ ID NO: 191 - protein, 516 aa, Artificial Sequence
  Synthetic
NPRENFLKCFSQYIPNNATNLKLVYTQNNPLYMSVLNSTIHNLRFTSDTTPKPLVIVTPSHVSHIQGTILCSKKVGLQIRTRSGGHDSEGMSYISQVPFVIVDLRNMRSIKIDVHSQTAWVEAGATLGEVYYWVNEKNENLSLAAGYCPTVCAGGHFGGGGYGPLMRNYGLAADNIIDAHLVNVHGKVLDRKSMGEDLFWALRGGGAESFGIIVAWKIRLVAVPKSTMFSVKKIMEIHELVKLVNKWQNIAYKYDKDLLLMTHFITRNITDNQGKNKTAIHTYFSSVFLGGVDSLVDLMNKSFPELGIKKTDCRQLSWIDTIIFYSGVVNYDTDNFNKEILLDRSAGQNKAFKIKLDYVKKPIPESVFVQILEKLYEEDIGAGMYALYPYGGIMDEISESAIPFPHRAGILYELWYICSWEKQEDNEKHLNWIRNIYNFMTPYVSKNPRLAYLNYRDLDIGINDPKNPNNYTQARIWGEKYFGKNFDRLVKVKTLVDPNNFFRNEQSIPPLPRHRH

SEQ ID NO: 192 - protein, 516 aa, Artificial Sequence
  Synthetic
NPRENFLKCFSQYIPNNATNLKLVYTQNNPLYMSVLNSTIHNLRFTSDTTPKPLVIVTPSHVSHIQGTILCSKKVGLQIRTRSGGHDSEGMSYISQVPFVIVDLRNMRSIKIDVHSQTAWVEAGATLGEVYYWVNEKNENLSLAAGYCPTVCAGGHFGGGGYGPLMRNYGLAADNIIDAHLVNVHGKVLDRKSMGEDLFWALRGGGAESFGIIVAWKIRLVAVPKSTMFSVKKIMEIHELVKLVNKWQNIAYKYDKDLLLMTHFITRNITDNQGKNKTAIHTYFSSVFLGGVDSLVDLMNKSFPELGIKKTDCRQLSWIDTIIFYSGVVNYDTDNFNKEILLDRSAGQNGAFKIKLDYVKKPIPESVFVQILEKLYEEDIGAGMYTLYPYGGIMDEISESAIPFPHRAGILYELWYICSWEKQEDNEKHLNWIRNIYNFMTPYVSKNPRLAYLNYRDLDIGINDPKNPNNYTQARIWGEKYFGKNFDRLVKVKTLVDPNNFFRNEQSIPPLPRHRH

SEQ ID NO: 193 - protein, 516 aa, Artificial Sequence
  Synthetic
NPRENFLKCFSQYIPNNATNLKLVYTQNNPLYMSVLNSTIHNLRFTSDTTPKPLVIVTPSHVSHIQGTILCSKKVGLQIRTRSGGHDSEGMSYISQVPFVIVDLRNMRSIKIDVHSQTAWVEAGATLGEVYYWVNEKNENLSLAAGYCPTVCAGGHFGGGGYGPLMRNYGLAADNIIDAHLVNVHGKVLDRKSMGEDLFWALRGGGAESFGIIVAWKIRLVAVPKSTMFSVKKIMEIHELVKLVNKWQNIAYKYDKDLLLMTHFITRNITDNQGKNKTAIHTYFSSVFLGGVDSLVDLMNKSFPELGIKKTDCRQLSWIDTIIFYSGVVNYDTDNFNKEILLDRSAGQNGAFKIKLDYVKKPIPESVFVQILEKLYEEDIGAGMYVLYPYGGIMDEISESAIPFPHRAGILYELWYICSWEKQEDNEKHLNWIRNIYNFMTPYVSKNPRLAYLNYRDLDIGINDPKNPNNYTQARIWGEKYFGKNFDRLVKVKTLVDPNNFFRNEQSIPPLPRHRH

SEQ ID NO: 194 - protein, 516 aa, Artificial Sequence
  Synthetic
NPRENFLKCFSQYIPNNATNLKLVYTQNNPLYMSVLNSTIHNLRFTSDTTPKPLVIVTPSHVSHIQGTILCSKKVGLQIRTRSGGHDSEGMSYISQVPFVIVDLRNMRSIKIDVHSQTAWVEAGATLGEVYYWVNEKNENLSLAAGYCPTVCAGGHFGGGGYGPLMRNYGLAADNIIDAHLVNVHGKVLDRKSMGEDLFWALRGGGAESFGIIVAWKIRLVAVPKSTMFSVKKIMEIHELVKLVNKWQNIAYKYDKDLLLMTHFITRNITDNQGKNKTAIHTYFSSVFLGGVDSLVDLMNKSFPELGIKKTDCRQLSWIDTIIFYSGVVNYDTDNFNKEILLDRSAGQNGAFKIKLDYVKKPIPESVFEQILEKLYEEDIGAGMYALYPYGGIMDEISESAIPFPHRAGILYELWYICSWEKQEDNEKHLNWIRNIYNFMTPYVSKNPRLAYLNYRDLDIGINDPKNPNNYTQARIWGEKYFGKNFDRLVKVKTLVDPNNFFRNEQSIPPLPRHRH

SEQ ID NO: 195 - protein, 516 aa, Artificial Sequence
  Synthetic
NPRENFLKCFSQYIPNNATNLKLVYTQNNPLYMSVLNSTIHNLRFTSDTTPKPLVIVTPSHVSHIQGTILCAKKVGLQIRTRSGGHDSEGMSYISQVPFVIVDLRNMRSIKIDVHSQTAWVEAGATLGEVYYWVNEKNENLSLAAGYCPTVCAGGHFGGGGYGPLMRNYGLAADNIIDAHLVNVHGKVLDRKSMGEDLFWALRGGGAESFGIIVAWKIRLVAVPKSTMFSVKKIMEIHELVKLVNKWQNIAYKYDKDLLLMTHFITRNITDNQGKNKTAIHTYFSSVFLGGVDSLVDLMNKSFPELGIKKTDCRQLSWIDTIIFYSGVVNYDTDNFNKEILLDRSAGQNGAFKIKLDYVKKPIPESVFVQILEKLYEEDIGAGMYALYPYGGIMDEISESAIPFPHRAGILYELWYICSWEKQEDNEKHLNWIRNIYNFMTPYVSKNPRLAYLNYRDLDIGINDPKNPNNYTQARIWGEKYFGKNFDRLVKVKTLVDPNNFFRNEQSIPPLPRHRH

SEQ ID NO: 196 - protein, 519 aa, Artificial Sequence
  Synthetic
NPQENFLKCFSQYIPNNATKSNAKLVYTQNDPLYMSVLNSTIQNLRFTSDTTPKPLVIVTPSNVSHIQGTILCSKKVGLQIRTRSGGHDAEGMSYISQVPFVIVDLRNMRSIKIDVHSQTAWVEAGATLGEVYYWINEKNENLSFPAGYCPTVGAGGHFSGGGYGALMRNYGLAADNIIDAHLVNVDGKVLDRKSMGEDLFWAIRGGGGESFGIIVAWKIRLVAVPSKSTMFSVKKNMEIHELVKLVNKWQNIAYKYDKDLLLMTHFITRNITDNQGKNKTTIHSYFSSIFLGGVDSLVDLMNKSFPELGIKKTDCKQLSWIDTIIFYSGVVNYDTTNFKKEILLDRSAGQNAAFKIKLDYVKKPIPETVMVKILEKLYEEDVGVGMYVLYPYGGIMDEISESAIPFPHRAGIMYELWYIASWEKQEDNEKHLNWIRNVYNFMTPYVSQNPRLAYLNYRDLDLGKNNPKSPNNYTQARIWGEKYFGKNFNRLVKVKTKVDPNNFFRNEQSIPPLPRHRH

SEQ ID NO: 197 - protein, 516 aa, Artificial Sequence
  Synthetic
NPRENFLKCFSQYIPNNATNLKLVYTQNNPLYMSVLNSTIHNLRFTSDTTPKPLVIVTPSHVSHIQGTILCSKKVGLQIRTRSGGHDSEGMSYISQVPFVIVDLRNMRSIKIDVHSQTAWVEAGATLGEVYYWVNEKNENLSLAAGYCPTVCAGGHFGGGGYGPLMRNYGLAADNIIDAHLVNVHGKVLDRKSMGEDLFWALRGGGAESFGIIVAWKIRLVAVPKSTMFSVKKILEIHELVKLVNKWQNIAYKYDKDLLLMTHFITRNITDNQGKNKTAIHTYFSSVFLGGVDSLVDLMNKSFPELGIKKTDCRQLSWIDTIIFYSGVVNYDTDNFNKEILLDRSAGQNGAFKIKLDYVKKPIPESVFVQILEKLYEEDIGAGMYALYPYGGIMDEISESAIPFPHRAGILYELWYICSWEKQEDNEKHLNWIRNIYNFMTPYVSKNPRLAYLNYRDLDIGINDPKNPNNYTQARIWGEKYFGKNFDRLVKVKTLVDPNNFFRNEQSIPPLPRHRH

SEQ ID NO: 198 - protein, 517 aa, Artificial Sequence; identical to SEQ ID NO: 155
  Synthetic

SEQ ID NO: 199 - protein, 517 aa, Artificial Sequence; identical to SEQ ID NO: 150
  Synthetic

SEQ ID NO: 200 - protein, 518 aa, Artificial Sequence
  Synthetic
ANPRENFLKCFSKHIPNNVANPKLVYTQHDQLYMSILNSTIQNLRFISDTTPKPLVIVTPSNNSHIQATILCSKKVGLQIRTRSGGHDAEGMSYISQVPFVVVDLRNMHSIKIDVHSQTAWVEAGATLGEVYYWINEKNENLSFPGGYCPTVGVGGHFSGGGYGALMRNYGLAADNIIDAHLVNVDGKVLDRKSMGEDLFWAIRGGGGENFGIIAAWKIKLVAVPSKSTIFSVKKNMEIHGLVKLFNKWQNIAYKYDKDLVLMTHFITKNITDNHGKNKTTVHGYFSSIFHGGVDSLVDLMNKSFPELGIKKTDCKEFSWIDTTIFYSGVVNFNTANFKKEILLDRSAGKKTAFSIKLDYVKKPIPETAMVKILEKLYEEDVGAGMYVLYPYGGIMEEISESAIPFPHRAGIMYELWYTASWEKQEDNEKHINWVRSVYNFTTPYVSQNPRLAYLNYRDLDLGKTNHASPNNYTQARIWGEKYFGKNFNRLVKVKTKVDPNNFFRNEQSIPPLPRHRH

SEQ ID NO: 201 - protein, 516 aa, Artificial Sequence
  Synthetic
NPRENFLKCFSQYIPNNATNLKLVYTQNNPLYMSVLNSTIHNLRFTSDTTPKPLVIVTPSHVSHIQGTILCSKKVGLQIRTRSGGHDSEGMSYISQVPFVIVDLRNMRSIKIDVHSQTAWVEAGATLGEVYYWVNEKNENLSLAAGYCPTVCAGGHFGGGGYGPLMRNYGLAADNIIDAHLVNVHGKVLDRKSMGEDLFWALRGGGAESFGIIVAWKIRLVAVPKSTMFSVKKIMEIHELVKLVNKWQNIAYKYDKDLTLMTHFITRNITDNQGKNKTAIHTYFSSVFLGGVDSLVDLMNKSFPELGIKKTDCRQLSWIDTIIFYSGVVNYDTDNFNKEILLDRSAGQNGAFKIKLDYVKKPIPESVFVQILEKLYEEDIGAGMYALYPYGGIMDEISESAIPFPHRAGILYELWYICSWEKQEDNEKHLNWIRNIYNFMTPYVSKNPRLAYLNYRDLDIGINDPKNPNNYTQARIWGEKYFGKNFDRLVKVKTLVDPNNFFRNEQSIPPLPRHRH

SEQ ID NO: 202 - protein, 516 aa, Artificial Sequence
  Synthetic
NPRENFLKCFSQYIPNNATNLKLVYTQNNPLYMSVLNSTIHNLRFTSDTTPKPLVIVTPSHVSHIQGTILCSKKVGLQIRTRSGGHDSEGMSYISQVPFVIVDLRNMRSIKIDVHSQTAWVEAGATLGEVYYWVNEKNENLSLAAGYCPTVCAGGHFGGGGYGPLMRNYGLAADNIIDAHLVNVHGKVLDRKSMGEDLFWALRGGGAESFGIIVAWKIRLVAVPKSTMFSVKKIMEIHELVKLVNKWQNIAYKYDKDLLLMTHFITRNITDNQGKNKTAIHTYFSSVFLGGVDSLVDLMNKSFPELGIKKTDCRQLSWIDTIIFYSGVVNYDTDNFNKEILLDRSAGQNGAFKIKLDYVKKPIPESVFVQILEKLYEEDIGAGMYALYPYGGIMDEISESAIPFPHRAGILYELWYVCSWEKQEDNEKHLNWIRNIYNFMTPYVSKNPRLAYLNYRDLDIGINDPKNPNNYTQARIWGEKYFGKNFDRLVKVKTLVDPNNFFRNEQSIPPLPRHRH

SEQ ID NO: 203 - protein, 517 aa, Artificial Sequence
  Synthetic
NPRENFLKCFSKHIPNNVANPKLVYTQHDQLYMSILNSTIQNLRFISDTTPKPLVIVTPSNNSHIQATILCSKKVGLQIRTRSGGHDAEGMSYISQVPFVVVDLRNMHSIKIDVHSQTAWVEAGATLGEVYYWINEKNENLSFPGGYCPTVGVGGHFSGGGYGALMRNYGLAADNIIDAHLVNVDGKVLDRKSMGEDLFWAIRGGGGENFGIIAAWKIKLVDVPSKSTIFSVKKNMEIHGLVKLFNKWQNIAYKYDKDLVLMTHFITKNITDNHGKNKTTVHGYFSSIFHGGVDSLVDLMNKSFPELGIKKTDCKEFSWIDTTIFYSGVVNFNTANFKKEILLDRSAGKKTAFSIKLDYVKKPIPETAMVKILEKLYEEDVGAGMYVLYPYGGIMEEISESAIPFPHRAGIMYELWYTASWEKQEDNEKHINWVRSVYNFTTPYVSQNPRLAYLNYRDLDLGKTNHASPNNYTQARIWGEKYFGKNFNRLVKVKTKVDPNNFFRNEQSIPPLPPHHH

SEQ ID NO: 204 - protein, 516 aa, Artificial Sequence
  Synthetic
NPRENFLKCFSQYIPNNATNLKLVYTQNNPLYMSVLNSTIHNLRFTSDTTPKPLVIVTPSHVSHIQGTILCSKKVGLQIRTRSGGHDSEGMSYISQVPFVIVDLRNMRSIKIDVHSQTAWVEAGATLGEVYYWVNEKNENLSLAAGYCPTVCAGGHFGGGGYGPLMRNYGLAADNIIDAHLVNVHGKVLDRKSMGEDLFWALRGGGAESFGIIVAWKIRLVAVPKSTMFSVKKIMEIHELVKLVNKWQNIAYKYDKDLLLMTHFITRNITDNQGKNKTAIHTYFSSVFLGGVDSLVDLMNKSFPELGIKKTDCRQLSWIDTIIFYSGVVNYDTDNFNKEILLDRSAGQNGAFKIKLDYVKKPIPESVFVQILEKLYEEDIGAGMYALYPYGGIMDEISESAIPFPHRAGILYSLWYICSWEKQEDNEKHLNWIRNIYNFMTPYVSKNPRLAYLNYRDLDIGINDPKNPNNYTQARIWGEKYFGKNFDRLVKVKTLVDPNNFFRNEQSIPPLPRHRH

SEQ ID NO: 205 - protein, 516 aa, Artificial Sequence
  Synthetic
NPRENFLKCFSQYIPNNATNLKLVYTQNNPLYMSVLNSTIHNLRFTSDTTPKPLVIVTPSHVSHIQGTILCSKKVGLQIRTRSGGHDSEGMSYISQVPFVIVDLRNMRSIKIDVHSQTAWVEAGATLGEVYYWVNEKNENLSLAAGYCPTVCAGGHFGGGGYGPLMRNYGLAADNIIDAHLVNVHGKVLDRKSMGEDLFWALRGGGAESFGIIVAWKIRLVAVPKSTMFSVKKIMEIHELVKLVNKWQNIAYKYDKDLLLMTHFITRNITDNQGKNKTAIHTYFSSVFLGGVDSLVDLMNKSFPELGIKKTDCRQLSWIDTIIFYSGVVNYDTDNFNKEILLDRSAGQNGAFKIKLDYVKKPIPESVFVQILEKLYEEDIGAGMYALYPYGGIMDEISESAIPFPHRAGILYTLWYICSWEKQEDNEKHLNWIRNIYNFMTPYVSKNPRLAYLNYRDLDIGINDPKNPNNYTQARIWGEKYFGKNFDRLVKVKTLVDPNNFFRNEQSIPPLPRHRH

SEQ ID NO: 206 - protein, 517 aa, Artificial Sequence; identical to SEQ ID NO: 142
  Synthetic

SEQ ID NO: 207 - protein, 516 aa, Artificial Sequence
  Synthetic
NPRENFLKCFSQYIPNNATNLKLVYTQNNPLYMSVLNSTIHNLRFTSDTTPKPLVIVTPSHVSHIQGTILCSKKVGLQIRTRSGGHDSEGMSYISQVPFVIVDLRNMRSIKIDVHSQTAWVEAGATLGEVYYWVNEKNENLSLAAGYCPTVCAGGHFGGGGYGPLMRNYGLAADNIIDAHLVNVHGKVLDRKSMGEDLFWALRGGGAESFGIIVAWKIRLVAVPKSTMFSVKKIMEIHELVKLVNKWQNIAYKYDKDLLLMTHFITRNITDNQGKNKTAIHTYFSSVFLGGVDSLVDLMNKSFPELGIKKTDCRQLSWIDTIIFYSGVVNYDTDNFNKEILLDRSAGQNGAFKIKLDYVKKPIPESVFKQILEKLYEEDIGAGMYALYPYGGIMDEISESAIPFPHRAGILYELWYICSWEKQEDNEKHLNWIRNIYNFMTPYVSKNPRLAYLNYRDLDIGINDPKNPNNYTQARIWGEKYFGKNFDRLVKVKTLVDPNNFFRNEQSIPPLPRHRH

SEQ ID NO: 208 - protein, 516 aa, Artificial Sequence
  Synthetic
NPRENFLKCFSQYIPNNATNLKLVYTQNNPLYMSVLNSTIHNLRFTSDTTPKPLVIVTPSHVSHIQGTILCSKKVGLQIRTRSGGHDSEGMSYISQVPFVIVDLRNMRSIKIDVHSQTAWVEAGATLGEVYYWVNEKNENLSLAAGYCPTVCAGGHFGGGGYGPLMRNYGLAADNIIDAHLVNVHGKVLDRKSMGEDLFWALRGGGAESFGIIVAWKIRLVAVPKSTMFSVKKIMEIHELVKLVNKWQNIAYKYDKDLLLMTHFITRNITDNQGKNKTAIHTYFSSVFLGGVDSLVDLMNKSFPELGIKKTDCRQLSWIDTIIFYSGVVNYDTDNFNKEILLDRSAGQNGAFKIKLDYVKKPIPESVFVQILEKLYEEDIGAGMYALYPYGGIMDEISESAIPFPHRAGILYELWYICSWEKQEDAEKHLNWIRNIYNFMTPYVSKNPRLAYLNYRDLDIGINDPKNPNNYTQARIWGEKYFGKNFDRLVKVKTLVDPNNFFRNEQSIPPLPRHRH

SEQ ID NO: 209 - protein, 516 aa, Artificial Sequence
  Synthetic
NPRENFLKCFSQYIPNNATNLKLVYTQNNPLYMSVLNSTIHNLRFTSDTTPKPLVIVTPSHVSHIQGTILCSKKHGLQIRTRSGGHDSEGMSYISQVPFVIVDLRNMRSIKIDVHSQTAWVEAGATLGEVYYWVNEKNENLSLAAGYCPTVCAGGHFGGGGYGPLMRNYGLAADNIIDAHLVNVHGKVLDRKSMGEDLFWALRGGGAESFGIIVAWKIRLVAVPKSTMFSVKKIMEIHELVKLVNKWQNIAYKYDKDLLLMTHFITRNITDNQGKNKTAIHTYFSSVFLGGVDSLVDLMNKSFPELGIKKTDCRQLSWIDTIIFYSGVVNYDTDNFNKEILLDRSAGQNGAFKIKLDYVKKPIPESVFVQILEKLYEEDIGAGMYALYPYGGIMDEISESAIPFPHRAGILYELWYICSWEKQEDNEKHLNWIRNIYNFMTPYVSKNPRLAYLNYRDLDIGINDPKNPNNYTQARIWGEKYFGKNFDRLVKVKTLVDPNNFFRNEQSIPPLPRHRH

SEQ ID NO: 210 - protein, 516 aa, Artificial Sequence
  Synthetic
NPRENFLKCFSQYIPNNATNLKLVYTQNNPLYMSVLNSTIHNLRFTSDTTPKPLVIVTPSHVSHIQGTILCSKKVGLQIRTRSGGHDSEGMSYISQVPFVIVDLRNMRSIKIDVHSQTAWVEAGATLGEVYYWVNEKNENLSLAAGYCPTVCAGGHFGGGGYGPLMRNYGLAADNIIDAHLVNVHGKVLDRKSMGEDLFWALRGGGAESFGIIVAWKIRLVAVPKSTMFSVKKIMEIHELVKLVNKWQNIAYKYDKDLLLMTHFITRNITDNQGKNKTAIHTYFSSVFLGGVDSLVDLMNKSFPELGIKKTDCRQLSWIDTIIFYSGVVNYDTDNFNKEILLDRSAGQNGAFKIKLDYVKKPIPESVFVQILEKLYEEDIGAGMYALYPYGGIMDEISESAIPFPHRAGILYELWYICSWEKQEDNEKHLNWIRNIYNFMTPYVSKNPRLAYLNYRDLDIGINDPKNPNNYTQARIWGEKYFGKNFDRLVKVKTLVDPDNFFRNEQSIPPLPRHRH

SEQ ID NO: 211 - protein, 516 aa, Artificial Sequence
  Synthetic
NPRENFLKCFSQYIPNNATNLKLVYTQNNPLYMSVLNSTIHNLRFTSDTTPKPLVIVTPSHVSHIQGTILCSKKVGLQIRTRSGGHDSEGMSYISQVPFVIVDLRNMRSIKIDVHSQTAWVEAGATLGEVYYWVNEKNENLSLAAGYCPTVCAGGHFGGGGYGPLMRNYGLAADNIIDAHLVNVHGKVLDRKSMGEDLFWALRGGGAESFGIIVAWKIRLVAVPKSTMFSVKKIMEIHELVKLVNKWQNIAYKYDKDLLLMTHFITRNITDNQGKNKTAIHTYFSSVFLGNVDSLVDLMNKSFPELGIKKTDCRQLSWIDTIIFYSGVVNYDTDNFNKEILLDRSAGQNGAFKIKLDYVKKPIPESVFVQILEKLYEEDIGAGMYALYPYGGIMDEISESAIPFPHRAGILYELWYICSWEKQEDNEKHLNWIRNIYNFMTPYVSKNPRLAYLNYRDLDIGINDPKNPNNYTQARIWGEKYFGKNFDRLVKVKTLVDPNNFFRNEQSIPPLPRHRH

SEQ ID NO: 212 - protein, 516 aa, Artificial Sequence
  Synthetic
NPRENFLKCFSQYIPNNATNLKLVYTQNNPLYMSVLNSTIHNLRFTSDTTPKPLVIVTPSHVSHIQGTILCSKKVGLQIRTRSGGHDSEGMSYISNVPFVIVDLRNMRSIKIDVHSQTAWVEAGATLGEVYYWVNEKNENLSLAAGYCPTVCAGGHFGGGGYGPLMRNYGLAADNIIDAHLVNVHGKVLDRKSMGEDLFWALRGGGAESFGIIVAWKIRLVAVPKSTMFSVKKIMEIHELVKLVNKWQNIAYKYDKDLLLMTHFITRNITDNQGKNKTAIHTYFSSVFLGGVDSLVDLMNKSFPELGIKKTDCRQLSWIDTIIFYSGVVNYDTDNFNKEILLDRSAGQNGAFKIKLDYVKKPIPESVFVQILEKLYEEDIGAGMYALYPYGGIMDEISESAIPFPHRAGILYELWYICSWEKQEDNEKHLNWIRNIYNFMTPYVSKNPRLAYLNYRDLDIGINDPKNPNNYTQARIWGEKYFGKNFDRLVKVKTLVDPNNFFRNEQSIPPLPRHRH

SEQ ID NO: 213 - protein, 516 aa, Artificial Sequence
  Synthetic
NPRENFLKCFSQYIPNNATNLKLVYTQNNPLYMSVLNSTIHNLRFTSDTTPKPLVIVTPSHVSHIQGTILCSKKVGLQIRTRSGGHDSEGMSYISQVPFVIVDLRNMRSIKIDVHSQTAWVEAGATLGEVYYWVNEKNENLSLAAGYCPTVCAGGHFGGGGYGPLMRNYGLAADNIIDAHLVNVHGKVLDRKSMGEDLFWALRGGGAESFGIIVAWKIRLVRVPKSTMFSVKKIMEIHELVKLVNKWQNIAYKYDKDLLLMTHFITRNITDNQGKNKTAIHTYFSSVFLGGVDSLVDLMNKSFPELGIKKTDCRQLSWIDTIIFYSGVVNYDTDNFNKEILLDRSAGQNGAFKIKLDYVKKPIPESVFVQILEKLYEEDIGAGMYALYPYGGIMDEISESAIPFPHRAGILYELWYICSWEKQEDNEKHLNWIRNIYNFMTPYVSKNPRLAYLNYRDLDIGINDPKNPNNYTQARIWGEKYFGKNFDRLVKVKTLVDPNNFFRNEQSIPPLPRHRH

SEQ ID NO: 214 - protein, 516 aa, Artificial Sequence
  Synthetic
NPRENFLKCFSQYIPNNATNLKLVYTQNNPLYMSVLNSTIHNLRFTSDTTPKPLVIVTPSHVSHIQGTILCSKKVGLQIRTRSGGHDSEGMSYISQVPFVIVDLRNMRSIKIDVHSQTAWVEAGATLGEVYYWVNEKNENLSLAAGYCPTVCAGGHFGGGGYGPLMRNYGLAADNIIDAHLVNVHGKLLDRKSMGEDLFWALRGGGAESFGIIVAWKIRLVAVPKSTMFSVKKIMEIHELVKLVNKWQNIAYKYDKDLLLMTHFITRNITDNQGKNKTAIHTYFSSVFLGGVDSLVDLMNKSFPELGIKKTDCRQLSWIDTIIFYSGVVNYDTDNFNKEILLDRSAGQNGAFKIKLDYVKKPIPESVFVQILEKLYEEDIGAGMYALYPYGGIMDEISESAIPFPHRAGILYELWYICSWEKQEDNEKHLNWIRNIYNFMTPYVSKNPRLAYLNYRDLDIGINDPKNPNNYTQARIWGEKYFGKNFDRLVKVKTLVDPNNFFRNEQSIPPLPRHRH

SEQ ID NO: 215 - protein, 516 aa, Artificial Sequence
  Synthetic
NPRENFLKCFSQYIPNNATNLKLVYTQNNPLYMSVLNSTIHNLRFTSDTTPKPLVIVTPSHVSHIQGTILCSKKVGLQIRTRSGGHDSEGMSYISQVPFVIVDLRNMRSIKIDVHSQTAWVEAGATLGEVYYWVNEKNKNLSLAAGYCPTVCAGGHFGGGGYGPLMRNYGLAADNIIDAHLVNVHGKVLDRKSMGEDLFWALRGGGAESFGIIVAWKIRLVAVPKSTMFSVKKIMEIHELVKLVNKWQNIAYKYDKDLLLMTHFITRNITDNQGKNKTAIHTYFSSVFLGGVDSLVDLMNKSFPELGIKKTDCRQLSWIDTIIFYSGVVNYDTDNFNKEILLDRSAGQNGAFKIKLDYVKKPIPESVFVQILEKLYEEDIGAGMYALYPYGGIMDEISESAIPFPHRAGILYELWYICSWEKQEDNEKHLNWIRNIYNFMTPYVSKNPRLAYLNYRDLDIGINDPKNPNNYTQARIWGEKYFGKNFDRLVKVKTLVDPNNFFRNEQSIPPLPRHRH

SEQ ID NO: 216 - protein, 516 aa, Artificial Sequence
  Synthetic
NPRENFLKCFSQYIPNNATNLKLVYTQNNPLYMSVLNSTIHNLRFTSDTTPKPLVIVTPSHVSHIQGTILCSKKVGLQIRTRSGGHDSEGMSYISQVPFVIVDLRNMRSIKIDVHSQTAWVEAGATLGEVYYWVNEKNENLSLAAGYCPTVCAGGHFGGGGYGPLMRNYGLAADNIIDAHLVNVHGKVLDRKSMGEDLFWALRGGGAESFGIIVAWKIRLVAVPKSTMFSVKKIMEIHELVKLVNKWQNIAYKYDKDLLLMTHFITRNITDNQGKNKTAIHTYFSSVFLGGVDSLVDLMNKSFPELGIKKTDCRQLSWIDTIIFYSGVVNYDTDNFNKEILLDRSAGQNGAFKIKLDYVKKPIPESVFVQILEKLYEEDIGAGMYALYPYGGIMDEISESAIPFPHRAGILYELWYICSWEKQEDNEKHLNWIRNIYNFMTPYVSKNPRLAYLNYRDLDIGINDPKNPNNYTQARIWGEKYFGNNFDRLVKVKTLVDPNNFFRNEQSIPPLPRHRH

SEQ ID NO: 217 - protein, 516 aa, Artificial Sequence
  Synthetic
NPRENFLKCFSQYIPNNATNLKLVYTQNNPLYMSVLNSTIHNLRFTSDTTPKPLVIVTPSHVSHIQGTILCSKKVGLQIRTRSGGHDSEGMSYISQVPFVIVDLRNMRSIKIDVHSQTAWVEAGATLGEVYYWVNEKNENLSLAAGYCPTVCAGGHFGGGGYGPLMRNYGLAADNIIDAHLVNVHGKVLDRKSMGEDLFWALRGGGAESFGIIVAWKIRLVAVPKSTMFSVKKIMEIHELVKLVNKWQNIAYKYDKDLLLMTHFITRNITDNQGKNKTAIHTYFSSVFLGGVDSLVDLMNKSFPELGIKKTDCRQLSWIDTIIFYSGVVNYDTDNFNKEILLDRSAGQNGAFKIKLDYVKKPIPESVFVQILEKLYEEDIGAGMYALYPYGGIMDEISESAIPFPHRAGILYELWYICSWESQEDNEKHLNWIRNIYNFMTPYVSKNPRLAYLNYRDLDIGINDPKNPNNYTQARIWGEKYFGKNFDRLVKVKTLVDPNNFFRNEQSIPPLPRHRH

SEQ ID NO: 218 - protein, 516 aa, Artificial Sequence
  Synthetic
NPRENFLKCFSQYIPNNATNLKLVYTQNNPLYMSVLNSTIHNLRFTSDTTPKPLVIVTPSHVSHIQGTILCSKKVGLQIRTRSGGHDSEGMSYISQVPFVIVDLRNMRSIKIDVHSQTAWVEAGATLGEVYYWVNEKNENLSLAAGYCPTVCAGGHFGGGGYGPLMRNYGLAADNIIDAHLVNVHGKVLDRKSMGEDLFWALRGGGAESFGIIVAWKIRLVAVPKSTMFSVKKIMEIHELVKLVNKWQNIAYKYDKDLLLMTHFITRNITDNQGKNKTAIHTYFSSVFLGGVDSLVDLMNKSFPELGIKKTDCRQLSWIDTIIFYSGVVNYDTDNFNKEILLDRSAGQNGAFKIKLDYVKKPIPESVFVQILEKLYEEEIGAGMYALYPYGGIMDEISESAIPFPHRAGILYELWYICSWEKQEDNEKHLNWIRNIYNFMTPYVSKNPRLAYLNYRDLDIGINDPKNPNNYTQARIWGEKYFGKNFDRLVKVKTLVDPNNFFRNEQSIPPLPRHRH

SEQ ID NO: 219 - protein, 516 aa, Artificial Sequence
  Synthetic
NPRENFLKCFSQYIPNNATNLKLVYTQNNPLYMSVLNSTIHNLRFTSDTTPKPLVIVTPSHVSHIQGTILCSKKVGLQIRTRSGGHDSEGMSYISQVPFVIVDLRNMRSIKIDVHSQTAWVEAGATLGEVYYWVNEKNENLSLAAGYCPTVCAGGHFGGGGYGPLMRNYGLAADNIIDAHLVNVHGKVLDRKSMGEDLFWALRGGGAESFGIIVAWKIRLVAVPKSTMFSVKKIMEIHELVKLVNKWQNIAYKYPKDLLLMTHFITRNITDNQGKNKTAIHTYFSSVFLGGVDSLVDLMNKSFPELGIKKTDCRQLSWIDTIIFYSGVVNYDTDNFNKEILLDRSAGQNGAFKIKLDYVKKPIPESVFVQILEKLYEEDIGAGMYALYPYGGIMDEISESAIPFPHRAGILYELWYICSWEKQEDNEKHLNWIRNIYNFMTPYVSKNPRLAYLNYRDLDIGINDPKNPNNYTQARIWGEKYFGKNFDRLVKVKTLVDPNNFFRNEQSIPPLPRHRH

SEQ ID NO: 220 - protein, 516 aa, Artificial Sequence
  Synthetic
NPRENFLKCFSQYIPNNATNLKLVYTQNNPLYMSVLNSTIHNLRFTSDTTPKPLVIVTPSHVSHIQATILCSKKVGLQIRTRSGGHDSEGMSYISQVPFVIVDLRNMRSIKIDVHSQTAWVEAGATLGEVYYWVNEKNENLSLAAGYCPTVCAGGHFGGGGYGPLMRNYGLAADNIIDAHLVNVHGKVLDRKSMGEDLFWALRGGGAESFGIIVAWKIRLVAVPKSTMFSVKKIMEIHELVKLVNKWQNIAYKYDKDLLLMTHFITRNITDNQGKNKTAIHTYFSSVFLGGVDSLVDLMNKSFPELGIKKTDCRQLSWIDTIIFYSGVVNYDTDNFNKEILLDRSAGQNGAFKIKLDYVKKPIPESVFVQILEKLYEEDIGAGMYALYPYGGIMDEISESAIPFPHRAGILYELWYICSWEKQEDNEKHLNWIRNIYNFMTPYVSKNPRLAYLNYRDLDIGINDPKNPNNYTQARIWGEKYFGKNFDRLVKVKTLVDPNNFFRNEQSIPPLPRHRH

SEQ ID NO: 221 - protein, 516 aa, Artificial Sequence
  Synthetic
NPRENFLKCFSQYIPNNATNLKLVYTQNNPLYMSVLNSTIHNLRFTSDTTPKPLVIVTPSHVSHIQGTILCSKKVGLQIRTRSGGHDSEGMSYISQVPFVIVDLRNMRSIKIDVHSQTAWVEAGATLGEVYYWVNEKSENLSLAAGYCPTVCAGGHFGGGGYGPLMRNYGLAADNIIDAHLVNVHGKVLDRKSMGEDLFWALRGGGAESFGIIVAWKIRLVAVPKSTMFSVKKIMEIHELVKLVNKWQNIAYKYDKDLLLMTHFITRNITDNQGKNKTAIHTYFSSVFLGGVDSLVDLMNKSFPELGIKKTDCRQLSWIDTIIFYSGVVNYDTDNFNKEILLDRSAGQNGAFKIKLDYVKKPIPESVFVQILEKLYEEDIGAGMYALYPYGGIMDEISESAIPFPHRAGILYELWYICSWEKQEDNEKHLNWIRNIYNFMTPYVSKNPRLAYLNYRDLDIGINDPKNPNNYTQARIWGEKYFGKNFDRLVKVKTLVDPNNFFRNEQSIPPLPRHRH

SEQ ID NO: 222 - protein, 516 aa, Artificial Sequence
  Synthetic
NPRENFLKCFSQYIPNNATNLKLVYTQNNPLYMSVLNSTIHNLRFTSDTTPKPLVIVTPSHVSHIQGTILCSKKVGLQIRTRSGGHDSEGMSYISQVPFVIVDLRNMRSIKIDVHSQTAWVEAGATLGEVYYWVNEKNENLSLAAGYCPTVCAGGHFGGGGYGPLMRNYGLAADNIIDAHLVNVHGKVLDRKSMGEDLFWALRGGGAESFGIIVAWKIRLVAVPKSTMFSVKKIMEIHELVKLVNKWQNIAYKYDKDLLLMTHFITRNITDNQGKNKTAIHTYFSSVFLGGVDSLVDLMNKSFPELGIKKTDCRQLSWIDTIIFYSGVVNYDTDNFNKEILLDRSAGQNGAFKIKLDYVKKPIPESVFVQILEKLYEEDIGAGMYALYPYGGIMDEISESAIPFPHRAGILYELWYICSWEKQEDNEKHLNWIRNIYNFMTPYVSKNPRLAYLNYRDLDIGTNDPKNPNNYTQARIWGEKYFGKNFDRLVKVKTLVDPNNFFRNEQSIPPLPRHRH

SEQ ID NO: 223 - protein, 516 aa, Artificial Sequence
  Synthetic
NPRENFLKCFSQYIPNNATNLKLVYTQNNPLYMSVLNSTIHNLRFTSDTTPKPLVIVTPSHVSHIQGTILCSKKVGLQIRTRSGGHDSEGMSYISQVPFVIVDLRNMRSIKIDVHSQTAWVEAGATLGEVYYWVNEKNENLSLAAGYCPTVCAGGHFGGGGYGPLMRNYGLAADNIIDAHLVNVHGKVLDRKSMGEDLFWALRGGGAESFGIIVAWKIRLVAVPKSTMFSVKKIMEIHELVKLVNKWQNIAYKYDKDLLLMTHFITRNITDNQGKNKTAIHTYFSSVFLGGVDELVDLMNKSFPELGIKKTDCRQLSWIDTIIFYSGVVNYDTDNFNKEILLDRSAGQNGAFKIKLDYVKKPIPESVFVQILEKLYEEDIGAGMYALYPYGGIMDEISESAIPFPHRAGILYELWYICSWEKQEDNEKHLNWIRNIYNFMTPYVSKNPRLAYLNYRDLDIGINDPKNPNNYTQARIWGEKYFGKNFDRLVKVKTLVDPNNFFRNEQSIPPLPRHRH

SEQ ID NO: 224 - protein, 516 aa, Artificial Sequence
  Synthetic
NPRENFLKCFSQYIPNNATNLKLVYTQNNPLYMSVLNSTIHNLRFTSDTTPKPLVIVTPSHVSHIQGTILCSKKVGLQIRTRSGGHDSEGMSYISQVPFVIVDLRNMRSIKIDVHSQTAWVEAGATLGEVYYWVNEKNENLSLAAGYCPTVCAGGHFGGGGYGPLMRNYGLAADNIIDAHLVNVHGKVLDRKSMGEDLFWALRGGGAESFGIIVAWKIRLVAVPKSTMFSVKKIMEIHELVKLVNKWQNIAYKYDKDLLLMTHFITRNITDNQGKNKTAIHTYFSSVFLGGVDSLVDLMNKSFPELGIKKTDCRQLSWIDTIIFYSGVVNYDTDNFNKEILLDRSAGQNGAFKIKLDYVKKPIPEEVFVQILEKLYEEDIGAGMYALYPYGGIMDEISESAIPFPHRAGILYELWYICSWEKQEDNEKHLNWIRNIYNFMTPYVSKNPRLAYLNYRDLDIGINDPKNPNNYTQARIWGEKYFGKNFDRLVKVKTLVDPNNFFRNEQSIPPLPRHRH

SEQ ID NO: 225 - protein, 516 aa, Artificial Sequence
  Synthetic
NPRENFLKCFSQYIPNNATNLNLVYTQNNPLYMSVLNSTIHNLRFTSDTTPKPLVIVTPSHVSHIQGTILCSKKVGLQIRTRSGGHDSEGMSYISQVPFVIVDLRNMRSIKIDVHSQTAWVEAGATLGEVYYWVNEKNENLSLAAGYCPTVCAGGHFGGGGYGPLMRNYGLAADNIIDAHLVNVHGKVLDRKSMGEDLFWALRGGGAESFGIIVAWKIRLVAVPKSTMFSVKKIMEIHELVKLVNKWQNIAYKYDKDLLLMTHFITRNITDNQGKNKTAIHTYFSSVFLGGVDSLVDLMNKSFPELGIKKTDCRQLSWIDTIIFYSGVVNYDTDNFNKEILLDRSAGQNGAFKIKLDYVKKPIPESVFVQILEKLYEEDIGAGMYALYPYGGIMDEISESAIPFPHRAGILYELWYICSWEKQEDNEKHLNWIRNIYNFMTPYVSKNPRLAYLNYRDLDIGINDPKNPNNYTQARIWGEKYFGKNFDRLVKVKTLVDPNNFFRNEQSIPPLPRHRH

SEQ ID NO: 226 - DNA, 1620 bp, Artificial Sequence
  Synthetic
atgaagtttatcagtaccttcttgacctttatcttggccgctgtctccgtaaccgctaatcctagagaaaactttctgaaatgcttctctaaacacattcccaataatgttgctaatcctaaactggtatatacccaacacgatcaattgtacatgtctatcttgaacagcacgatacagaacttgagattcatatcagatacgacaccaaagcctttggttattgttacccctagtaataatagtcatatccaggctacaatattgtgtagtaagaaagtgggcctacaaataagaaccagatcaggtggtcatgatgcggaaggcatgtcttatatttctcaggtaccatttgtggtggttgatttgagaaacatgcacagtatcaagatagacgttcacagtcaaacggcatgggtggaggcgggtgctacattaggtgaagtttattactggatcaacgaaaagaatgaaaatctgtctttcccaggcggctactgtcctacagttggcgttggcgggcatttctctggcggtggttatggagccttgatgagaaactatggcttggccgcagataatataatcgacgctcacttggttaacgttgatggtaaggtccttgatagaaaatccatgggtgaagatttgttttgggcaattagggggggtggtggtgaaaattttggaattattgcggcctggaaaattaggttggtagcagttccttccagggcaaccattttttctgttaagagaaacatggaaattcatggcctggtgaaattgtttaacaagtggcagaacatcgcatacaagtacgataaagatttgttgttaatgacccactttattaccaggaacattattgataaccaaggtaaaaataagaccaccgtccatggatacttttcgtgcatatttcatggtggtgttgatagtctagttaatttaatgaacaaatcttatcctgaactagggatcaaaaaaactgattgcaaggaattctcttggatagacacaacaattttttacagtggtgtcgtcaatttcaatacagcaaattttaagaaagaaatattattagataggagtgcaggcaaaaagacggctttttctattaaactagattatgttaagaagccaattccagagacagcaatggtaaagatcctagagaaactatacgaagaggatgtcggagtcggaatgtacgttctttatccatatgggggtattatggaggagatatccgaaagcgcaatcccatttccccatagagccggaattatgtatgaattgtggtacaccgcttcatgggagaagcaggaggataacgaaaagcacataaattgggtaaggtcagtttacaattttacaacaccatacgtctcacagaatccgagattggcttatttgaactacagagacttggacctgggaaagacaaacccagagagcccaaacaattacactcaagcaaggatttggggtgaaaagtacttcggtaaaaatttcaataggctggtgaaagtcaagactaaggcggatccgaacaacttcttcaggaacgaacaatccattccaccacttcctccacatcaccaccatgatgaatta

SEQ ID NO: 227 - DNA, 1620 bp, Artificial Sequence
  Synthetic
atgaagtttatcagtaccttcttgacctttatcttggccgctgtctccgtaaccgctaatccaagagaaaatttccttaaatgctttagcaagcatatccctaacaatgtcgcaaaccctaagcttgtgtacacgcaacatgatcagctttacatgtcgatccttaacagcactatacaaaatttgaggtttatttcagatacgaccccgaaacctttagtcattgtgactccatccaacaatagccatatacaagcaacaatattgtgtagtaagaaagtgggattgcaaatcaggaccagaagtggcggtcacgatgctgaaggaatgtcctacattagtcaagtccctttcgttgttgtagacttaaggaatatgcattcaattaaaatagacgttcattctcagaccgcttgggtcgaagcaggagcaacacttggcgaggtatactactggataaatgagaaaaacgaaaatctttcattcccaggtggttactgccctactgttggtgttggtggtcatttcagtggcggtggatatggagctttaatgaggaattacggtcttgctgccgacaatattattgacgctcatttagtcaatgtggacggaaaagtgttagataggaaaagcatgggtgaagatttattttgggccattagaggaggaggaggtgaaaattttggcattatagctgcatggaagattaaactagttgcagtcccctcaaaaagcactatcttttccgtaaagaaaaatatggaaattcatggtctggttaagttgtttaataagtggcaaaacatcgcttataagtatgataaagatcttgtgctaatgactcactttatcactaaaaatataactgataatcatggtaaaaataaaacaacagttcatggttatttttctagtatctttcatggtggcgtggatagcttagttgaccttatgaacaagtcgttcccagaactaggcattaagaagactgactgtaaagaattttcatggatcgacacaacaatcttttattccggtgttgttaacttcaacactgcaaattttaagaaagagatactattggatagatctgcgggtaaaaagacggctttctccattaaactggactacgtaaagaaaccaatccctgagaccgcaatggttaaaattttggaaaagttgtacgaagaagatgttggcgctggtatgtacgtcttatatccatatggtggaattatggacgaaatttctgagtctgctattcccttccctcatagagccggcatcatgtatgagttatggtacactgctagctgggagaaacaggaagataatgagaaacatttgaactggataaggagcgtctacaactttaccactccttacgtatcgcaaaatcctagactagcctacttaaattatagagatctggatttggggaagactaaccctgaatctcccaataattacacacaagctagaatatggggcgagaaatacttcggaaaaaattttaacaggttagtaaaggttaaaaccaaggcggatcctaacaatttcttccgtaatgaacaaagcattccacccttgccaccccaccatcatcatgatgaatta

SEQ ID NO: 228 - DNA, 1620 bp, Artificial Sequence
  Synthetic
atgaagtttatcagtaccttcttgacctttatcttggccgctgtctccgtaaccgctaatcctagagaaaatttcttgaaatgcttttccaaacacatccctaacaatgtcgccaatcccaaattagtttatactcaacatgatcaactatatatgtcaatattaaattctactattcaaaatttgagatttattagtgatactactccaaaacctctggtgattgtcactccaagcaacaattcccacatccaggcaacaatcttgtgtagcaagaaagtgggacttcaaattaggaccagatctggtggccatgatgcggaaggtatgtcatatattagtcaagttccgtttgtagtagttgatttgcgtaatatgcatagtatcaagatcgacgttcattcccaaacagcctgggtggaggcgggtgccactctgggggaagtttactactggataaatgagaagaacgagaatttatcatttccgggtggttactgccctacagtaggggtaggtggtcatttttcaggcggtggctacggggcattaatgaggaattatggattggctgctgataacataatagacgcccatttagtcaacgtagatgggaaagtgttggataggaagtctatgggtgaagacctattttgggcaatcagaggaggcggcggagagaacttcggtattattgccgcatggaaaataaagctagtcgccgtaccgtccaaatctactattttttccgtcaagaaaaatatggaaatccatgggctggttaaattgtttaataaatggcagaatatagcttataagtacgataaggatctggttcttatgactcattttattaccaaaaatataacagacaatcatgggaaaaacaaaactactgtacacggatatttctcaagtattttccatggcggggtagatagcttagtagacttgatgaataaatcgttcccagaattaggaattaagaagactgactgtaaggaattcagttggatagatacgaccattttctattcaggtgttgttaattttaacaccgccaactttaaaaaggaaattttactggacagatccgccggtaaaaagacagctttttcaatcaagttggattatgtaaaaaaacctataccagaaactgcaatggttaaaattcttgaaaagttatacgaagaggatgtcggagccggaatgtacgtattatacccttatgggggtatcatggatgaaatatctgaatcggctattccattccctcacagggcaggtattatgtatgaattgtggtataccgctagctgggagaagcaagaggataacgaaaagcacctgaattggataaggaacatttataattttatgactccatatgtctcaaaaaacccacgtttagcttacttaaattatcgtgatttggatataggtatcaacgacccaaagaatccaaataactacacccaagctagaatttggggtgagaaatactttggaaagaattttgataggctagtaaaagtgaagacacttgttgacccaaacaatttttttagaaacgaacaaagcattccacctttgcctcgtcatagacaccatgatgaatta

SEQ ID NO: 229 - DNA, 1620 bp, Artificial Sequence
  Synthetic
atgaagtttatcagtaccttcttgacctttatcttggccgctgtctccgtaaccgctaatccccaagaaaatttcctgaaatgtttcagcgagtatataccaaataaccctgcaaatcctaagtttatatatactcaacatgaccaactttacatgtctgttttaaattctaccattcaaaatttgagatttacaagcgataccactccaaaacctttggttatagtgacaccgagtaacgttagtcatattcaggcttcaatcttgtgctcgaaaaaggtgggattacaaattaggactcgtagcggaggtcatgattctgagggtatgagttacatttctcaagttcccttcgttgttgtggaccttaggaatatgcattccataaaaatagatgtacactctcagacagcatgggttgaagctggtgccacactgggggaagtatattattggatcaacgaaaagaacgagaacctgtcgtttcctggtggctattgcccaacagtcggtgtaggcggacactttagtggtggtggatacggtgccctaatgaggaactacggactagctgccgataatataatcgatgcacatctagtcaatgttgatggcaaagtcttagacaggaagtctatgggtgaagacctattctgggctataagaggtggtggtggggaaaatttcggtatcatagcggcatggaagataaaacttgtagctgtgcctagtaagtctaccattttctctgtaaaaaaaaacatggagattcacggtttggtgaagctttttaataaatggcaaaacattgcctacaaatacgataaagatttgctattgatgacacatttcataactagaaatattactgacaaccagggtaaaaacaagacggcaattcacacttacttttcttctgtttttttaggtggtgttgattctttagttgatttgatgaataagagttttccggaactgggcataaagaagaccgactgtaaggaattgtcttggatcgacaccaccattttttactccggagttgttaattacaatactactaattttcaaaaagagatattattagatagatcagctggcaagaaaacagccttttctatcaaattggattatgtaaaaaaacccatacctgaaacagctatggtgaagattttagaaaaattgtatgaagaagacgtgggcgtgggcatgtacgttctatacccctacggcggtattatggaagaaatttctgagagcgcgatccctttcccgcatagggcaggaatcatgtatgagttatggtacacggcatcgtgggaaaaacaagaagacaacgaaaagcatatcaactgggtgaggtctgtttacaattttacaactccctatgttagtcaaaatccaagattggcatacttaaattacagagatcttgacttgggaaaaacaaatccagaatcgcccaacaattacacgcaagccagaatctggggggaaaaatactttgggaaaaattttaacaggttagtcaaagtgaagactaaagccgatccaaataacttttttagaaatgagcagtctatccctccattaccgccacatcatcatcatgatgaatta

SEQ ID NO: 230 - DNA, 1620 bp, Artificial Sequence
  Synthetic
atgaagtttatcagtaccttcttgacctttatcttggccgctgtctccgtaaccgctaatcccagagaaaattttttgaagtgtttttcaaagcacatacctaacaacgtcgccaatccgaagcttgtttatacacaacacgatcaactatacatgtctattttgaatagtactattcagaatcttagatttatctcagacacaacacctaagccattggttattgtgacaccgtctaataattctcacattcaagcaacaatattgtgctcgaaaaaggttggcttgcagatcagaactagaagtggtggacatgatgcagaagggatgtcatatatatctcaagtacccttcgtagttgttgatttaagaaatatgcactctatcaaaatagatgtgcacagtcaaactgcttgggtcgaagctggcgcaactctaggggaggtgtactattggattaatgaaaaaaacgaaaatctatcctttcctggcggttactgcccgactgtaggtgtcggagggcacttcagtggtggtggatatggagctttgatgaggaactatggcttggctgcagataacattatagacgctcacctagtaaacgtagatgggaaagtcttagatagaaaatcaatgggtgaggatttgttttgggctattcgtggcggagggggcgaaaactttggtatcattgccgcatggaagataaaacttgtggctgttcccagcaaatcaactattttctctgttaagaagaatatggaaattcatgggttagttaaacttttcaataagtggcaaaatattgcctataaatatgacaaagatttggtattgatgacacatttcatcactaagaatatcactgacaatcatggaaagaacaaaacaacagtacacggttacttctcctcaattttccatggtggtgtcgattcccttgtcgatctgatgaacaagtctttccctgaactaggtataaagaaaaccgactgtaaagagttttcatggatagacacaacgatattttattcaggagtggtgaactttaacactgcaaatttcaaaaaggagattttattggacagatctgcaggtaagaagactgcctttagcattaaattggactatgtaaaaaagccgatcccagagaccgctatggttaaaatcttagaaaagttatacgaggaagacgtcggtgcaggaatgtatgtcttgtatccttatggcggtatcatggaagaaatatcagagtctgctatcccatttccacatagagcagggataatgtacgagttgtggtatactgcatcatgggaaaagcaagaggataacgaaaaacacataaactgggtaagatccgtttataattttactactccatacgtatctcaaaatcctagattagcttatttaaactacagagatttagatttagggaaaaccaaccatgctagtaggaacaactacacccaagccagaatatggggtgaaaaatactttggaaaaaattttaataggttagtaaaagtgaaaacaaaagtcgatcccaacaattttttcagaaacgagcaatccatacctcccttacctccgcaccatcaccatgatgaatta

SEQ ID NO: 231 - skipped

SEQ ID NO: 232 - DNA, 1620 bp, Artificial Sequence
  Synthetic
atgaagtttatcagtaccttcttgacctttatcttggccgctgtctccgtaaccgctaatcccagggagaattttttaaaatgcttttcgaagcatatcccaaacaatgtagctaatccaaagctggtttacacacaacacgatcaactatatatgtctatattgaacagtaccatccaaaacttaaggttcatatccgacacaactcctaaaccactagtaattgtgacgcctagcaacaattctcatatacaggcaaccatattatgttcaaagaaagttggattgcaaatccgtaccagatcaggtggtcacgatgcagagggcatgagctatatttctcaagtgccctttgtagtcgtggatcttagaaacatgcatagtatcaagatcgatgtgcactcacaaacagcttgggttgaggcaggtgccactctgggggaagtatattattggataaatgaaaaaaatgaaaatttaagtttcccagggggttactgtccgaccgttggagtaggtggacacttttccggggggggttatggcgctttgatgagaaactatggtttggctgctgacaacattatcgacgctcatcttgttaacgtagatggtaaagtacttgatagaaaaagcatgggcgaagaccttttctgggccataagaggtggcggtggggagaattttgggattattgctgcctggaagattaaattggttgccgtcccatcaaagtccacaattttctcggttaagaaaaacatggagatccacggtttagttaagttatttaacaagtggcagaacattgcctacaagtatgataaggatttgctacttatgacccactttattactagaaatatcactgacaatcaaggcaagaacaaaacagcaatacatacctactttagttcagtttttttaggtggagtagatagtctagttgatttaatgaataaatcctttccagaattggggattaaaaagaccgattgtaaagagttgtcctggattgatactacaattttttacagcggtgtagttaattttaatacagccaatttcaaaaaggaaattttattggacagatccgcagggaaaaaaacggccttttctattaaattagattatgttaaaaagcccattcccgaaacagctatggttaaaattttggaaaaactttacgaggaggacgtgggtgctggtatgtatgtattatatccgtatggcggtattatggatgaaatttccgagtcagcaattcccttcccacacagggctggaatcatgtatgaattatggtatactgcttcttgggagaagcaggaagataacgagaaacacattaattgggtaaggtcggtttacaattttaccactccctacgtatcgcaaaacccccgtttggcctatttaaattatagagacttagacttaggaaaaacaaacccagaatcgcctaacaattacacccaagcaaggatatggggagaaaaatattttggtaagaatttcaatcgtttagttaaggtgaagactaaagccgatccaaataactttttcaggaatgaacaatccatcccaccacttcctcctcatcatcatcatgatgaatta

SEQ ID NO: 233 - protein, 540 aa, Artificial Sequence
  Synthetic
MKFISTFLTFILAAVSVTANPRENFLKCFSKHIPNNVANPKLVYTQHDQLYMSILNSTIQNLRFISDTTPKPLVIVTPSNNSHIQATILCSKKVGLQIRTRSGGHDAEGMSYISQVPFVVVDLRNMHSIKIDVHSQTAWVEAGATLGEVYYWINEKNENLSFPGGYCPTVGVGGHFSGGGYGALMRNYGLAADNIIDAHLVNVDGKVLDRKSMGEDLFWAIRGGGGENFGIIAAWKIRLVAVPSRATIFSVKRNMEIHGLVKLFNKWQNIAYKYDKDLLLMTHFITRNIIDNQGKNKTTVHGYFSCIFHGGVDSLVNLMNKSYPELGIKKTDCKEFSWIDTTIFYSGVVNFNTANFKKEILLDRSAGKKTAFSIKLDYVKKPIPETAMVKILEKLYEEDVGVGMYVLYPYGGIMEEISESAIPFPHRAGIMYELWYTASWEKQEDNEKHINWVRSVYNFTTPYVSQNPRLAYLNYRDLDLGKTNPESPNNYTQARIWGEKYFGKNFNRLVKVKTKADPNNFFRNEQSIPPLPPHHHHDEL

SEQ ID NO: 234 - protein, 540 aa, Artificial Sequence
  Synthetic
MKFISTFLTFILAAVSVTANPRENFLKCFSKHIPNNVANPKLVYTQHDQLYMSILNSTIQNLRFISDTTPKPLVIVTPSNNSHIQATILCSKKVGLQIRTRSGGHDAEGMSYISQVPFVVVDLRNMHSIKIDVHSQTAWVEAGATLGEVYYWINEKNENLSFPGGYCPTVGVGGHFSGGGYGALMRNYGLAADNIIDAHLVNVDGKVLDRKSMGEDLFWAIRGGGGENFGIIAAWKIKLVAVPSKSTIFSVKKNMEIHGLVKLFNKWQNIAYKYDKDLVLMTHFITKNITDNHGKNKTTVHGYFSSIFHGGVDSLVDLMNKSFPELGIKKTDCKEFSWIDTTIFYSGVVNFNTANFKKEILLDRSAGKKTAFSIKLDYVKKPIPETAMVKILEKLYEEDVGAGMYVLYPYGGIMDEISESAIPFPHRAGIMYELWYTASWEKQEDNEKHLNWIRSVYNFTTPYVSQNPRLAYLNYRDLDLGKTNPESPNNYTQARIWGEKYFGKNFNRLVKVKTKADPNNFFRNEQSIPPLPPHHHHDEL

SEQ ID NO: 235 - protein, 540 aa, Artificial Sequence
  Synthetic
MKFISTFLTFILAAVSVTANPRENFLKCFSKHIPNNVANPKLVYTQHDQLYMSILNSTIQNLRFISDTTPKPLVIVTPSNNSHIQATILCSKKVGLQIRTRSGGHDAEGMSYISQVPFVVVDLRNMHSIKIDVHSQTAWVEAGATLGEVYYWINEKNENLSFPGGYCPTVGVGGHFSGGGYGALMRNYGLAADNIIDAHLVNVDGKVLDRKSMGEDLFWAIRGGGGENFGIIAAWKIKLVAVPSKSTIFSVKKNMEIHGLVKLFNKWQNIAYKYDKDLVLMTHFITKNITDNHGKNKTTVHGYFSSIFHGGVDSLVDLMNKSFPELGIKKTDCKEFSWIDTTIFYSGVVNFNTANFKKEILLDRSAGKKTAFSIKLDYVKKPIPETAMVKILEKLYEEDVGAGMYVLYPYGGIMDEISESAIPFPHRAGIMYELWYTASWEKQEDNEKHLNWIRNIYNFMTPYVSKNPRLAYLNYRDLDIGINDPKNPNNYTQARIWGEKYFGKNFDRLVKVKTLVDPNNFFRNEQSIPPLPRHRHHDEL

SEQ ID NO: 236 - protein, 540 aa, Artificial Sequence
  Synthetic
MKFISTFLTFILAAVSVTANPQENFLKCFSEYIPNNPANPKFIYTQHDQLYMSVLNSTIQNLRFTSDTTPKPLVIVTPSNVSHIQASILCSKKVGLQIRTRSGGHDSEGMSYISQVPFVVVDLRNMHSIKIDVHSQTAWVEAGATLGEVYYWINEKNENLSFPGGYCPTVGVGGHFSGGGYGALMRNYGLAADNIIDAHLVNVDGKVLDRKSMGEDLFWAIRGGGGENFGIIAAWKIKLVAVPSKSTIFSVKKNMEIHGLVKLFNKWQNIAYKYDKDLLLMTHFITRNITDNQGKNKTAIHTYFSSVFLGGVDSLVDLMNKSFPELGIKKTDCKELSWIDTTIFYSGVVNYNTTNFQKEILLDRSAGKKTAFSIKLDYVKKPIPETAMVKILEKLYEEDVGVGMYVLYPYGGIMEEISESAIPFPHRAGIMYELWYTASWEKQEDNEKHINWVRSVYNFTTPYVSQNPRLAYLNYRDLDLGKTNPESPNNYTQARIWGEKYFGKNFNRLVKVKTKADPNNFFRNEQSIPPLPPHHHHDEL

SEQ ID NO: 237 - protein, 540 aa, Artificial Sequence
  Synthetic
MKFISTFLTFILAAVSVTANPRENFLKCFSKHIPNNVANPKLVYTQHDQLYMSILNSTIQNLRFISDTTPKPLVIVTPSNNSHIQATILCSKKVGLQIRTRSGGHDAEGMSYISQVPFVVVDLRNMHSIKIDVHSQTAWVEAGATLGEVYYWINEKNENLSFPGGYCPTVGVGGHFSGGGYGALMRNYGLAADNIIDAHLVNVDGKVLDRKSMGEDLFWAIRGGGGENFGIIAAWKIKLVAVPSKSTIFSVKKNMEIHGLVKLFNKWQNIAYKYDKDLVLMTHFITKNITDNHGKNKTTVHGYFSSIFHGGVDSLVDLMNKSFPELGIKKTDCKEFSWIDTTIFYSGVVNFNTANFKKEILLDRSAGKKTAFSIKLDYVKKPIPETAMVKILEKLYEEDVGAGMYVLYPYGGIMEEISESAIPFPHRAGIMYELWYTASWEKQEDNEKHINWVRSVYNFTTPYVSQNPRLAYLNYRDLDLGKTNHASRNNYTQARIWGEKYFGKNFNRLVKVKTKVDPNNFFRNEQSIPPLPPHHHHDEL

SEQ ID NO: 238 - skipped

SEQ ID NO: 239 - protein, 540 aa, Artificial Sequence
  Synthetic
MKFISTFLTFILAAVSVTANPRENFLKCFSKHIPNNVANPKLVYTQHDQLYMSILNSTIQNLRFISDTTPKPLVIVTPSNNSHIQATILCSKKVGLQIRTRSGGHDAEGMSYISQVPFVVVDLRNMHSIKIDVHSQTAWVEAGATLGEVYYWINEKNENLSFPGGYCPTVGVGGHFSGGGYGALMRNYGLAADNIIDAHLVNVDGKVLDRKSMGEDLFWAIRGGGGENFGIIAAWKIKLVAVPSKSTIFSVKKNMEIHGLVKLFNKWQNIAYKYDKDLLLMTHFITRNITDNQGKNKTAIHTYFSSVFLGGVDSLVDLMNKSFPELGIKKTDCKELSWIDTTIFYSGVVNFNTANFKKEILLDRSAGKKTAFSIKLDYVKKPIPETAMVKILEKLYEEDVGAGMYVLYPYGGIMDEISESAIPFPHRAGIMYELWYTASWEKQEDNEKHINWVRSVYNFTTPYVSQNPRLAYLNYRDLDLGKTNPESPNNYTQARIWGEKYFGKNFNRLVKVKTKADPNNFFRNEQSIPPLPPHHHHDEL

SEQ ID NO: 240 - DNA, 1620 bp, Artificial Sequence
  Synthetic
atgaagtttatcagtaccttcttgacctttatcttggccgctgtctccgtaaccgctaatcccagggagaactttcttaagtgtttcagtaaacatatcccaaataacgtggcgaatccgaaattagtatacacgcaacacgatcagctatatatgagcattctgaatagtaccattcaaaacttgcgctttatatcggacacaactccaaagcctttagtcatagttactccttcaaataattcccatattcaggctacaatcctctgctctaaaaaagttgggttgcaaatacgtactagatcaggaggccacgatgccgaaggtatgtcttatatctcccaagtgccattcgttgtcgtcgacttgaggaacatgcattctattaagattgatgtacactcccagaccgcatgggttgaagctggtgccacattaggtgaagtatactattggataaacgagaaaaatgaaaatttatcgtttcctggaggctattgtccaactgttggtgtcggtggtcatttctcaggcgggggctacggagcattgatgcgaaactacggactagcagctgataacattatagacgcccatctcgtgaatgtggatggtaaagttcttgatagaaagagcatgggtgaagatttgttttgggcgatcagaggcggtggaggggaaaactttggtattattgcggcttggaaaataaagctggtcgcagttccctcgaaaagcacaatcttttctgtaaagaaaaatatggaaatacatgggttggtcaagttattcaataaatggcaaaacattgcttataagtatgataaagacctcgttctgatgactcattttattacgaaaaatattaccgacaatcacggtaagaataaaactacagtgcacggttacttttcttcaattttccatggtggcgttgactctctagtagatttaatgaacaaaagtttccctgagttagggatcaagaaaacggattgtaaagaattttcttggatcgacacaaccatattctattcgggtgttgttaactttaataccgcaaactttaaaaaggaaattttgttagatcgctctgctggaaagaaaacagcatttagtatcaaacttgactatgtaaagaaaccgatacccgagactgccatggttaagatacttgagaagctatacgaagaggatgtgggagctggcatgtacgttctctacccttacggcggtataatggaagaaatttcagaatccgcaatcccattcccacacagagcaggtattatgtatgaactgtggtatactgcctcatgggagaaacaagaagataacgaaaaacacattaattgggtccgtagcgtctacaatttcactacaccatatgtatcccaaaacccgagattggcttacttgaattatagagacttggatctaggaaaaaccaatcatgccagcccgaataattatacacaggcaaggatttggggcgagaagtatttcggcaagaacttcaacagattagtaaaagttaagaccaaagttgaccccaataacttttttagaaatgaacaaagtatccctccactcccaccacatcatcatcatgatgaatta

SEQ ID NO: 241 - DNA, 1620 bp, Artificial Sequence
  Synthetic
atgaagtttatcagtaccttcttgacctttatcttggccgctgtctccgtaaccgctaacccacgtgagaactttttgaaatgtttctctaagcatatccctaacaatgtggctaacccaaagttagtttacacacagcacgatcaactatatatgagcattttgaactccactatccaaaatctgaggttcattagtgacaccacgcccaaaccattggttattgtaaccccttctgataactctcatatccaagctactatattatgttccaagaaggtcggcttgcaaattagaactagatcaggaggtcacgatgctgaaggtatgtcatacatttcccaagttccattcgttgttgtagacctaagaaatatgcactctatcaaaattgatgtccattctcaaacagcctgggtcgaagctggtgctaccttgggtgaagtttattactggattaacgaaaagaatgaaaacttgtcgttcccaggtggttactgtccaaccgtgggtgttggtggacactttagcggtggtggatacggcgccttgatgagaaactatggtttagctgctgacaatatcatcgatgcacaccttgtcaacgttgatggtaaggtattggacagaaaatcaatgggtgaagacttgttctgggctataagaggtggcggtggtgagaactttggtatcatcgctgcatggaagattaagttagttgccgtcccatctaagtccactatcttcagtgttaaaaagaacatggaaattcatggtttggtcaagctatttaataaatggcagaacatcgcttacaagtacgataaggacttagttttgatgacccattttataactaaaaacattactgataaccacggtaaaaataagactacagttcacggttatttctcctctatcttccatggtggagttgactctctggtcgacctaatgaacaagtccttcccagaattgggtattaagaagactgattgcaaagaattttcatggatcgataccaccattttctactctggcgtggttaactttaatacggctaactttaagaaggaaatattgttagaccgttcggccggtaagaaaaccgctttttctataaagttggattatgttaagaaacctattcctgaaacagccatggtcaagatcttagaaaaattgtacgaagaggatgtaggagctggtatgtacgttctttacccatatggtggtattatggaagaaatatctgagtctgccattccattcccacatagggcaggcattatgtacgaattgtggtatactgctagctgggaaaagcaagaagacaatgaaaaacacataaattgggttagaagtgtatacaatttcactaccccctacgtcagccaaaacccaagattggcctatctaaactaccgtgacctggacctaggtaaaactaaccacgcttcaccaaacaactacacccaagctagaatctggggagagaagtatttcggtaagaatttcaacagattggtcaaagtgaagaccaaggtcgatccaaataattttttcagaaacgagcaatctattcccccattaccaccacatcatcaccatgatgaatta

SEQ ID NO: 242 - DNA, 1620 bp, Artificial Sequence
  Synthetic
atgaagtttatcagtaccttcttgacctttatcttggccgctgtctccgtaaccgctaaccctcaggaaaatttcctgaagtgtttttctcaatatattccaactaatgtgacaaacgccaaactcgtttacacgcaacacgatcaattttatatgtccatacttaatagtaccatccagaacttgagattcacttcggacacaacaccgaaacccctagtcattataactcctttaaatgtaagccatattcaaggtaccatcctatgctcaaagaaagttgggttacagattaggactcgttcaggaggtcatgatgctgagggcatgtcttacatcagtcaagtcccatttgttgtagtggatttgcgaaatatgcattctataaaaattgacgttcacagtcaaacggcgtgggtagaagcaggagctacattaggtgaggtttattactggataaatgaaaagaacgaaaacttgagctttccaggcggatattgtcctactgtaggtgtgggcggacatttctctggtggtgggtacggtgcattgatgagaaattatggcttagccgctgataatattattgatgcacacctggtcaatgttgacgggaaagttcttgacagaaagtccatgggggaggatctcttctgggctatccgcggtggtggaggtgaaaattttggtattatcgcagcctggaaaattaaactggtcgctgtcccatcaaagtcgaccatattttctgttaagaaaaacatggaaattcatggattggttaagctatttaataaatggcagaacattgcatataagtatgataaagacttagtgctaatgacccatttcataactaaaaacatcacagataaccacggtaagaataaaacaaccgtgcatggctacttttcctcaatattccatggaggcgtagatagtctggtagatcttatgaataagtcttttcccgagcttgggatcaagaaaaccgactgcaaggaattttcctggattgatactacgattttctactcaggtgtagtcaatttcaacacggccaattttaaaaaagaaatactgttggacaggtcggcgggaaagaaaaccgcttttagcatcaagttagactatgttaaaaaaccgataccagaaactgccatggttaaaatattggagaaattatatgaagaggatgtgggcgcaggtatgtatgtgctatacccttacggtggaattatggaagaaatttccgaaagtgctattccgtttcctcatagagctggaataatgtatgaattgtggtacactgcgtcatgggaaaaacaagaagataacgagaagcacattaattgggtaaggagcgtttataattttacaacgccttacgtcagtcaaaacccaaggctggcatatttaaattatcgggatttagacctcggcaaaacaaatcacgcctctccaaacaattacacacaagcgagaatatggggtgaaaagtattttggaaagaatttcaaccgtctagttaaagtcaagactaaggttgatcctaataacttcttcagaaacgaacagagcatccccccattgcctttacgtcaccatcatgatgaatta

SEQ ID NO: 243 - DNA, 1620 bp, Artificial Sequence
  Synthetic
atgaagtttatcagtaccttcttgacctttatcttggccgctgtctccgtaaccgctaatcctcgagagaactttctgaagtgtttcagcaaacacataccaaataatgtagctaacccgaaattggtttacacacagcatgatcaactatatatgagtatcttaaattctacgattcaaaacttgaggtttatttccgacaccactccaaagcctcttgtcattgtgactccctcaaacaattcacatatccaagcgaccatattatgctctaaaaaagttggtttacagatcagaacacgttcgggagggcatgatgccgaaggtatgtcctatattagtcaagtgccattcgtagttgtcgatctcagaaacatgcacagcattaagatcgacgtccattctcaaactgcatgggttgaagccggcgcaacattgggtgaggtttactattggataaatgaaaaaaatgaaaacctctcgtttcccggaggctattgtcctacggtaggtgttgggggtcacttctcaggtggaggctacggcgctctaatgagaaattacggtcttgctgcggataatattatagacgcacatctagtgaacgtcgatggcaaggtgttagatcgcaaatctatgggggaagatttgttttgggctatcaggggtggtggaggtgagaatttcggcattattgcagcatggaagattaaactggtcgccgttccaagtaagtctactatattttccgtaaaaaaaaatatggaaattcatggactggtaaagttgtttaacaaatggcagaacatcgcttataaatatgataaggacttagttttgatgacccacttcattacaaagaacataactgataatcatggtaaaaataaaaccactgtacacggttacttttcctcaatttttcatggaggagtggattcacttgttgacctgatgaacaagagtttcccagaattgggcatcaaaaaaacagactgcaaggaattttcttggatagataccacaatcttctactcaggtgtcgtgaattttaacactgctaattttaaaaaggagattttactagatagatccgcggggaagaaaacagcattttcaataaagcttgattatgtaaaaaaacccattccggaaaccgctatggttaaaatattagagaagttatatgaagaagatgtcggtgccggaatgtacgttctctatccttatggcgggatcatggaggaaatatcggagagcgctattccattcccccaccgtgccggtattatgtacgaactatggtacacagcatcttgggaaaaacaagaggataatgaaaaacatattaattgggtgcggtctgtttataattttacgaccccatatgtgtcacaaaacccaaggttagcctacttgaattatagagacttggacctaggcaagacgaaccacgcttctcctaataattatactcaggctcgtatatggggtgaaaagtacttcggtaagaacttcaatagactggtgaaggtgaaaactaaagttgacccaaacaatttctttagaaatgaacagtcaatcccccctcttcctcctcatcatcatcatgatgaatta

SEQ ID NO: 244 - DNA, 1620 bp, Artificial Sequence
  Synthetic
atgaagtttatcagtaccttcttgacctttatcttggccgctgtctccgtaaccgctaatccacaagagaactttcttaaatgtttctctcagtacatcccgacgaatgtcactaacgcgaagttagtttatacccaacatgaccagttctatatgagtatactgaatagcacaattcaaaacttgcgttttacatcggatactactcctaaaccattggtaattatcacccctctcaatgtgtcccacatacaagggacaattctatgctctaaaaaggttggtttacaaatccgaacgaggtcaggcggacatgatgcagaaggtatgtcatacatttcccaagtaccctttgttgtggtcgatttaagaaatatgcattctataaaaattgacgttcacagtcagacagcctgggtagaagctggtgctaccttgggagaagtctattactggattaacgagaagaatgaaaatttaagcttcccaggcggttattgtcccactgttggagtcggtggccactttagcgggggtggttatggagcactaatgagaaactacggcctggccgctgataacataatcgacgcacatcttgttaatgtagatggtaaagtactagatcgcaagagtatgggagaagatctattttgggccattcgtgggggtggtggagagaatttcggcataattgctgcatggaaaataaagcttgttgcggtgccttcaaaatccactatcttttctgttaaaaagaacatggaaattcatggcttggtcaaattattcaataagtggcaaaatatcgcttataagtacgacaaagatttggtgctgatgacacactttataactaagaacattacagacaatcatggtaaaaacaaaaccaccgtgcacgggtacttttcttcaatttttcatggcggtgtcgattcgctggtagacttgatgaataaaagcttcccggagttaggtattaaaaagactgattgtaaagaattttcttggatagatactacaattttctattccggagttgtaaactttaatactgccaatttcaaaaaagaaatcttacttgacagatctgctgggaaaaagacggcattttctataaaattggattacgttaagaaaccaatacccgaaaccgcaatggttaaaatcctggagaagttatatgaagaagatgtgggagctggtatgtatgtactatacccatacggtggcataatggaagagatctcagaatccgcaatccctttcccacatcgggctggtatcatgtatgaattatggtatacagccagttgggaaaagcaagaagataacgaaaagcatattaactgggtgagatcggtctacaattttaccactccctatgttagtcaaaaccctagactagcctatttgaattatagggacttagatctcggaaaaacgaaccacgcatcacctaataactacacccaggcgagaatttggggtgagaagtacttcggtaaaaattttaataggttggtcaaagttaaaacaaaggttgatcccaacaacttctttcgcaatgagcaatcgattccaccattaccgttgcgacatcatcatgatgaatta

SEQ ID NO: 245 - DNA, 1623 bp, Artificial Sequence
  Synthetic
atgaagtttatcagtaccttcttgacctttatcttggccgctgtctccgtaaccgctgccaatccccgtgaaaacttcttaaaatgcttttctaagcacatcccaaataacgtagcaaatcctaaattggtgtatacacaacatgaccagctttacatgtcaattctaaacagtacgatacaaaatctgaggtttatttcggataccactccaaagccgctcgttatagtcactccatccaataactcacatatccaggcgacaattttgtgttctaaaaaagttggtttacaaattagaacccggagcggagggcatgatgctgagggcatgtcctatatctcccaagtccctttcgtagtggttgaccttagaaatatgcacagtataaagattgatgtccatagtcagactgcctgggttgaagctggtgcaacattaggtgaagtatactattggataaacgaaaagaatgagaacttgtcatttccaggaggctactgtcctactgttggagtcggtgggcacttctctggtggaggctatggtgctctaatgagaaattacggtttagcagcggataacattatagacgcccatctggtgaatgttgatggtaaagttttggaccgaaagtctatgggtgaagatttattttgggctattcgtggaggagggggcgagaacttcggaatcattgcagcttggaaaataaagttggttgcagtacccagcaaatcgaccatcttttctgtcaaaaaaaatatggaaattcacggcctcgtgaaactttttaataagtggcaaaatattgcgtataagtatgataaagatttagttctcatgacacattttatcaccaaaaacatcacggataatcatggtaaaaataagactacggtccacgggtactttagttcaattttccatggtggtgttgattcacttgtagacctaatgaataagtcgttccctgagttggggataaagaaaacagattgcaaagaattttcctggattgacactacgattttctactctggtgttgtcaactttaacacagctaatttcaaaaaagaaattttgctagataggtctgctggcaaaaagacagctttttcaattaaactggactatgtgaaaaaaccgatcccagaaactgccatggtaaagatattagaaaagctgtacgaggaagatgtaggtgcgggtatgtatgtactatacccttatggcggtataatggaggaaatcagtgaaagcgcaataccatttccccaccgcgccggcatcatgtacgagctttggtataccgccagttgggaaaaacaagaagataatgagaagcatatcaactgggttagatcagtttataatttcactaccccctacgtgtcgcaaaacccacggttggcctatctaaattatagagacttagatttgggtaaaacaaatcatgcttcaccaaataactacactcaggctaggatatggggcgaaaaatacttcggtaagaactttaatagattagttaaagtcaagacgaaggttgatccgaataatttttttagaaacgagcaatccattcctcccttaccgagacacagacatcatgatgaatta

SEQ ID NO: 246 - DNA, 1620 bp, Artificial Sequence
  Synthetic
atgaagtttatcagtaccttcttgacctttatcttggccgctgtctccgtaaccgctaatcctcgtgagaactttctcaaatgcttctccaagcatatacccaataacgttgcaaatccgaaattggtatatacgcagcacgaccaactgtacatgtcaatcttaaatagtactattcaaaaccttcgatttatttcggataccacaccaaagcctttggtgatagttactccatctaacaattctcatatccaagcgacaattttatgtagcaaaaaggtcggcctacagattagaacccgcagtgggggtcacgatgccgaaggtatgtcctatatatctcaagtaccattcgtcgtggttgacttaaggaacatgcattcaattaaaatcgatgtgcactcgcaaactgcttgggttgaagctggagcaacgttaggtgaggtatactattggattaatgaaaagaatgaaaatttgtcttttccgggaggttactgtcccaccgttggcgtgggcggtcatttttcagggggagggtatggagccctcatgagaaactacggtctagcagctgataatataatagacgctcatcttgtcaatgttgatggtaaagtcctggacagaaaaagcatgggtgaggatctattctgggcgatcaggggtggcgggggagaaaattttggcattatcgccgcctggaagattaaacttgtcgatgtaccatccaaatctacaatattttcagtgaagaagaacatggaaattcatggtttggtaaaattattcaacaagtggcagaacatcgcttataaatatgataaagatttggttctaatgactcattttataacaaaaaacattacagacaatcacggtaagaataaaactaccgttcacggatatttcagttcaatcttccatggaggcgttgattcattggttgatttaatgaacaaatcgtttcctgagcttggtatcaaaaaaaccgattgcaaggaatttagctggatagacacaacgattttctactctggtgtagtgaattttaatacggcaaatttcaagaaggaaatactattagatagaagtgctggcaaaaagactgcattttctattaaattagattacgtgaagaaacccattcctgaaactgccatggttaagattttagaaaagttgtacgaggaggacgtaggcgcagggatgtatgttctgtatccatatggaggtattatggaagaaataagtgagtctgctattccattcccacatcgtgcgggtatcatgtatgaactgtggtatactgcatcctgggaaaagcaagaagataatgaaaaacacattaactgggttcgcagcgtgtacaattttacgacaccgtacgtcagccaaaaccctagactagcttatttgaattacagagatcttgacctgggaaaaaccaaccatgcgtcaccgaataactacacacaggcgcggatatggggcgaaaagtattttggtaagaacttcaataggttggttaaagtcaaaactaaagtggaccccaataatttttttcgtaatgaacaatcgatcccacccttacctccacatcaccatcatgatgaatta

SEQ ID NO: 247 - protein, 540 aa, Artificial Sequence
  Synthetic
MKFISTFLTFILAAVSVTANPRENFLKCFSKHIPNNVANPKLVYTQHDQLYMSILNSTIQNLRFISDTTPKPLVIVTPSNNSHIQATILCSKKVGLQIRTRSGGHDAEGMSYISQVPFVVVDLRNMHSIKIDVHSQTAWVEAGATLGEVYYWINEKNENLSFPGGYCPTVGVGGHFSGGGYGALMRNYGLAADNIIDAHLVNVDGKVLDRKSMGEDLFWAIRGGGGENFGIIAAWKIKLVAVPSKSTIFSVKKNMEIHGLVKLFNKWQNIAYKYDKDLVLMTHFITKNITDNHGKNKTTVHGYFSSIFHGGVDSLVDLMNKSFPELGIKKTDCKEFSWIDTTIFYSGVVNFNTANFKKEILLDRSAGKKTAFSIKLDYVKKPIPETAMVKILEKLYEEDVGAGMYVLYPYGGIMEEISESAIPFPHRAGIMYELWYTASWEKQEDNEKHINWVRSVYNFTTPYVSQNPRLAYLNYRDLDLGKTNHASPNNYTQARIWGEKYFGKNFNRLVKVKTKVDPNNFFRNEQSIPPLPPHHHHDEL

SEQ ID NO: 248 - protein, 540 aa, Artificial Sequence
  Synthetic
MKFISTFLTFILAAVSVTANPRENFLKCFSKHIPNNVANPKLVYTQHDQLYMSILNSTIQNLRFISDTTPKPLVIVTPSDNSHIQATILCSKKVGLQIRTRSGGHDAEGMSYISQVPFVVVDLRNMHSIKIDVHSQTAWVEAGATLGEVYYWINEKNENLSFPGGYCPTVGVGGHFSGGGYGALMRNYGLAADNIIDAHLVNVDGKVLDRKSMGEDLFWAIRGGGGENFGIIAAWKIKLVAVPSKSTIFSVKKNMEIHGLVKLFNKWQNIAYKYDKDLVLMTHFITKNITDNHGKNKTTVHGYFSSIFHGGVDSLVDLMNKSFPELGIKKTDCKEFSWIDTTIFYSGVVNFNTANFKKEILLDRSAGKKTAFSIKLDYVKKPIPETAMVKILEKLYEEDVGAGMYVLYPYGGIMEEISESAIPFPHRAGIMYELWYTASWEKQEDNEKHINWVRSVYNFTTPYVSQNPRLAYLNYRDLDLGKTNHASPNNYTQARIWGEKYFGKNFNRLVKVKTKVDPNNFFRNEQSIPPLPPHHHHDEL

SEQ ID NO: 249 - protein, 540 aa, Artificial Sequence
  Synthetic
MKFISTFLTFILAAVSVTANPQENFLKCFSQYIPTNVTNAKLVYTQHDQFYMSILNSTIQNLRFTSDTTPKPLVIITPLNVSHIQGTILCSKKVGLQIRTRSGGHDAEGMSYISQVPFVVVDLRNMHSIKIDVHSQTAWVEAGATLGEVYYWINEKNENLSFPGGYCPTVGVGGHFSGGGYGALMRNYGLAADNIIDAHLVNVDGKVLDRKSMGEDLFWAIRGGGGENFGIIAAWKIKLVAVPSKSTIFSVKKNMEIHGLVKLFNKWQNIAYKYDKDLVLMTHFITKNITDNHGKNKTTVHGYFSSIFHGGVDSLVDLMNKSFPELGIKKTDCKEFSWIDTTIFYSGVVNFNTANFKKEILLDRSAGKKTAFSIKLDYVKKPIPETAMVKILEKLYEEDVGAGMYVLYPYGGIMEEISESAIPFPHRAGIMYELWYTASWEKQEDNEKHINWVRSVYNFTTPYVSQNPRLAYLNYRDLDLGKTNHASPNNYTQARIWGEKYFGKNFNRLVKVKTKVDPNNFFRNEQSIPPLPLRHHHDEL

SEQ ID NO: 250 - protein, 540 aa, Artificial Sequence; identical to SEQ ID NO: 247
  Synthetic

SEQ ID NO: 251 - protein, 540 aa, Artificial Sequence; identical to SEQ ID NO: 249
  Synthetic

SEQ ID NO: 252 - protein, 541 aa, Artificial Sequence
  Synthetic
MKFISTFLTFILAAVSVTAANPRENFLKCFSKHIPNNVANPKLVYTQHDQLYMSILNSTIQNLRFISDTTPKPLVIVTPSNNSHIQATILCSKKVGLQIRTRSGGHDAEGMSYISQVPFVVVDLRNMHSIKIDVHSQTAWVEAGATLGEVYYWINEKNENLSFPGGYCPTVGVGGHFSGGGYGALMRNYGLAADNIIDAHLVNVDGKVLDRKSMGEDLFWAIRGGGGENFGIIAAWKIKLVAVPSKSTIFSVKKNMEIHGLVKLFNKWQNIAYKYDKDLVLMTHFITKNITDNHGKNKTTVHGYFSSIFHGGVDSLVDLMNKSFPELGIKKTDCKEFSWIDTTIFYSGVVNFNTANFKKEILLDRSAGKKTAFSIKLDYVKKPIPETAMVKILEKLYEEDVGAGMYVLYPYGGIMEEISESAIPFPHRAGIMYELWYTASWEKQEDNEKHINWVRSVYNFTTPYVSQNPRLAYLNYRDLDLGKTNHASPNNYTQARIWGEKYFGKNFNRLVKVKTKVDPNNFFRNEQSIPPLPRHRHHDEL

SEQ ID NO: 253 - protein, 540 aa, Artificial Sequence
  Synthetic
MKFISTFLTFILAAVSVTANPRENFLKCFSKHIPNNVANPKLVYTQHDQLYMSILNSTIQNLRFISDTTPKPLVIVTPSNNSHIQATILCSKKVGLQIRTRSGGHDAEGMSYISQVPFVVVDLRNMHSIKIDVHSQTAWVEAGATLGEVYYWINEKNENLSFPGGYCPTVGVGGHFSGGGYGALMRNYGLAADNIIDAHLVNVDGKVLDRKSMGEDLFWAIRGGGGENFGIIAAWKIKLVDVPSKSTIFSVKKNMEIHGLVKLFNKWQNIAYKYDKDLVLMTHFITKNITDNHGKNKTTVHGYFSSIFHGGVDSLVDLMNKSFPELGIKKTDCKEFSWIDTTIFYSGVVNFNTANFKKEILLDRSAGKKTAFSIKLDYVKKPIPETAMVKILEKLYEEDVGAGMYVLYPYGGIMEEISESAIPFPHRAGIMYELWYTASWEKQEDNEKHINWVRSVYNFTTPYVSQNPRLAYLNYRDLDLGKTNHASPNNYTQARIWGEKYFGKNFNRLVKVKTKVDPNNFFRNEQSIPPLPPHHHHDEL

SEQ ID NO: 254 - DNA, 1551 bp, Artificial Sequence
  Synthetic
aacccacgtgagaactttttgaaatgtttctctaagcatatccctaacaatgtggctaacccaaagttagtttacacacagcacgatcaactatatatgagcattttgaactccactatccaaaatctgaggttcattagtgacaccacgcccaaaccattggttattgtaaccccttctaataactctcatatccaagctactatattatgttccaagaaggtcggcttgcaaattagaactagatcaggaggtcacgatgctgaaggtatgtcatacatttcccaagttccattcgttgttgtagacctaagaaatatgcactctatcaaaattgatgtccattctcaaacagcctgggtcgaagctggtgctaccttgggtgaagtttattactggattaacgaaaagaatgaaaacttgtcgttcccaggtggttactgtccaaccgtgggtgttggtggacactttagcggtggtggatacggcgccttgatgagaaactatggtttagctgctgacaatatcatcgatgcacaccttgtcaacgttgatggtaaggtattggacagaaaatcaatgggtgaagacttgttctgggctataagaggtggcggtggtgagaactttggtatcatcgctgcatggaagattaagttagttgccgtcccatctaagtccactatcttcagtgttaaaaagaacatggaaattcatggtttggtcaagctatttaataaatggcagaacatcgcttacaagtacgataaggacttagttttgatgacccattttataactaaaaacattactgataaccacggtaaaaataagactacagttcacggttatttctcctctatcttccatggtggagttgactctctggtcgacctaatgaacaagtccttcccagaattgggtattaagaagactgattgcaaagaattttcatggatcgataccaccattttctactctggcgtggttaactttaatacggctaactttaagaaggaaatattgttagaccgttcggccggtaagaaaaccgctttttctataaagttggattatgttaagaaacctattcctgaaacagccatggtcaagatcttagaaaaattgtacgaagaggatgtaggagctggtatgtacgttctttacccatatggtggtattatggaagaaatatctgagtctgccattccattcccacatagggcaggcattatgtacgaattgtggtatactgctagctgggaaaagcaagaagacaatgaaaaacacataaattgggttagaagtgtatacaatttcactaccccctacgtcagccaaaacccaagattggcctatctaaactaccgtgacctggacctaggtaaaactaaccacgcttcaccaaacaactacacccaagctagaatctggggagagaagtatttcggtaagaatttcaacagattggtcaaagtgaagaccaaggtcgatccaaataattttttcagaaacgagcaatctattcccccattaccaccacatcatcac

SEQ ID NO: 255 - DNA, 1551 bp, Artificial Sequence
  Synthetic
aacccacgtgagaactttttgaaatgtttctctaagcatatccctaacaatgtggctaacccaaagttagtttacacacagcacgatcaactatatatgagcattttgaactccactatccaaaatctgaggttcattagtgacaccacgcccaaaccattggttattgtaaccccttctaataactctcatatccaagctactatattatgttccaagaaggtcggcttgcaaattagaactagatcaggaggtcacgatgctgaaggtatgtcatacatttcccaagttccattcgttgttgtagacctaagaaatatgcactctatcaaaattgatgtccattctcaaacagcctgggtcgaagctggtgctaccttgggtgaagtttattactggattaacgaaaagaatgaaaacttgtcgttcccaggtggttactgtccaaccgtgggtgttggtggacactttagcggtggtggatacggcgccttgatgagaaactatggtttagctgctgacaatatcatcgatgcacaccttgtcaacgttgatggtaaggtattggacagaaaatcaatgggtgaagacttgttctgggctataagaggtggcggtggtgagaactttggtatcatcgctgcatggaagattaagttagttgccgtcccatctaagtccactatcttcagtgttaaaaagaacatggaaattcatggtttggtcaagctatttaataaatggcagaacatcgcttacaagtacgataaggacttaatgttgatgacccattttataactaaaaacattactgataaccacggtaaaaataagactacagttcacggttatttctcctctatcttccatggtggagttgactctctggtcgacctaatgaacaagtccttcccagaattgggtattaagaagactgattgcaaagaattttcatggatcgataccaccattttctactctggcgtggttaactttaatacggctaactttaagaaggaaatattgttagaccgttcggccggtaagaaaaccgctttttctataaagttggattatgttaagaaacctattcctgaaacagccatggtcaagatcttagaaaaattgtacgaagaggatgtaggagctggtatgtacgttctttacccatatggtggtattatggaagaaatatctgagtctgccattccattcccacatagggcaggcattatgtacgaattgtggtatactgctagctgggaaaagcaagaagacaatgaaaaacacataaattgggttagaagtgtatacaatttcactaccccctacgtcagccaaaacccaagattggcctatctaaactaccgtgacctggacctaggtaaaactaaccacgcttcaccaaacaactacacccaagctagaatctggggagagaagtatttcggtaagaatttcaacagattggtcaaagtgaagaccaaggtcgatccaaataattttttcagaaacgagcaatctattcccccattaccaccacatcatcac

SEQ ID NO: 256 - DNA, 1551 bp, Artificial Sequence
  Synthetic
aatcccagagagaactttctcaaatgcttctctaagcatatacctaataatgtggccaacccaaaactggtttatacacaacacgatcagttgtacatgtcaattttaaacagcactatccaaaatcttaggtttatttcggacaccacgccgaagcctttagtcatcgtaacaccaagtaacaattcacatatacaagcaactattctatgttccaaaaaggttggtttgcagatccgtacccgctctggagggcacgatgcggaaggcatgtcttatattagtcaagtaccattcgtcgttgtagacctaagaaatatgcatagcataaaaattgatgtgcactcgcagactgcttgggttgaagctggtgcaacattgggtgaggtttactattggattaatgaaaaaaatgaaaacttatcctttcccggtggctactgtcctacggtgggagtcggtggtcatttctcaggaggcgggtatggtgccttgatgcgaaactacggattagcggctgataatattattgacgcacatcttgttaacgtagatggaaaggtactcgacagaaaatccatgggggaagatctgttttgggctatcaggggcggtggtggcgagaattttggtataatcgctgcatggaaaatcaagttggtggatgtgccatctaaatcaacaattttctccgttaagaagaatatggaaattcacggcttagtcaaattgttcaacaagtggcaaaatatagcctataaatatgataaagacctggttctaatgactcattttatcacaaaaaacataaccgataatcatggaaagaataagactactgtccatggttactttagtagtatttttcatggtggtgtagactctctcgttgatttgatgaacaaaagctttcccgagctcggaataaaaaagaccgactgcaaggaattttcgtggattgatacaacaatattctacagtggcgttgtcaattttaataccgcaaacttcaaaaaagaaattttactggatagatctgccgggaaaaagacagctttctcaatcaagcttgattatgtaaagaaaccgattcctgaaactgcaatggtaaaaatactagagaaattatacgaagaggatgttggtgcgggaatgtatgtcttatatccatatggtggcatcatggaagaaatctcagaatcagctatcccatttccacaccgtgccgggataatgtacgagttatggtacactgcatcttgggaaaaacaagaagataacgaaaaacacattaattgggtgaggtcggtttataacttcaccactccttacgtttcacaaaaccccagactagcttatttgaactatagagacttagaccttgggaaaactaatcatgctagccctaataactatacgcaggccagaatttggggtgaaaagtattttgggaagaatttcaatcggcttgtcaaggttaaaacaaaggtggatccaaataacttttttcggaacgaacagagtattccacccctaccgccgcatcatcat

SEQ ID NO: 257 - DNA, 1554 bp, Artificial Sequence
  Synthetic
gcaaatcctcgagaaaactttctgaagtgcttcagcaaacacattccaaataacgtggccaatcccaaacttgtttacacccagcatgatcaattatatatgtcgatcctaaattccactatacaaaacctcaggtttatttcagacacaacgccgaagccattggtaatcgttactccttctaataacagtcatattcaagcgacaatattatgttctaaaaaggtcggattgcagattagaactcgttcagggggtcacgatgctgagggcatgtcgtatataagtcaagtccccttcgttgtagtggacctaagaaatatgcattcaattaaaatcgatgttcattctcagaccgcttgggtcgaagcaggagccacattaggtgaagtatactattggattaacgaaaaaaatgagaatttgtcctttccaggtggctactgtccaacggttggtgttggtgggcacttcagtggaggtggatatggtgctctcatgcgcaactacggcctagctgccgataacataatcgacgcacatttggttaatgtggatggaaaagtattagataggaagtcaatgggtgaagatctgttttgggctataagaggtgggggaggcgaaaacttcggaattattgccgcatggaagataaaattggtggctgtcccttccaaatctactatttttagcgtcaagaaaaatatggagatacacggtcttgtcaagctatttaacaaatggcaaaatatcgcctataagtatgataaagacttagttttaatgacacatttcattacaaaaaatattaccgacaatcacggcaaaaataaaaccaccgtgcatggttacttctcatcgatctttcatgggggcgtagactctttagtagatcttatgaacaagagttttcctgaattgggcataaagaaaactgattgcaaagaatttagttggatcgatacgactattttttactcgggtgtggttaatttcaacactgcgaactttaagaaggagattttactagaccggtctgctggtaaaaaaacagcattctctatcaagctagactatgttaaaaaaccgatcccagaaaccgcgatggtgaagatacttgaaaaattgtacgaggaagatgtgggtgctgggatgtatgtcctttatccgtacggaggtattatggaagaaatatcagagagtgcaattccattccctcaccgagctggaattatgtatgaactctggtacacagcttcgtgggaaaagcaagaagataatgagaaacatattaattgggttagatccgtatataactttactactccatatgtttcccagaatccaagattggcatatcttaattaccgtgacctggatctgggcaagacaaatcatgcttcacccaacaactacactcaagcaaggatctggggtgaaaaatacttcggtaaaaattttaataggcttgtcaaggttaagacgaaagtagatcctaataactttttcagaaatgagcagagcattccgccattaccaagacatcgccac

SEQ ID NO: 258 - DNA, 1554 bp, Artificial Sequence
  Synthetic
gctaacccacaagagaattttcttaagtgtttcagccagtacatacctacgaatgttactaacgcaaaattagtgtatacccaacacgatcagttttatatgtcgattttgaatagtacaatccaaaacctccgattcacatccgacactacacccaaaccgctagtcattataaccccattgaatgtatctcatattcaagggactatcctgtgctcaaagaaagttggtttacagattaggactagatctggaggccatgatgccgaaggtatgtcatacatcagtcaagtaccttttgtcgttgttgacttaagaaatatgcactctataaagattgatgtacattcccaaacggcgtgggtggaagctggtgcaaccttgggagaagtgtattattggatcaatgaaaaaaacgagaacctctcattccccggcggatactgtccaaccgttggtgtcggtgggcattttagtggcgggggttatggtgcccttatgagaaattacggtttagctgctgataacatcattgatgcacatctagtaaatgttgacggcaaggtcttggaccgtaaatccatgggagaggatttattctgggcgatacgcggaggtgggggcgaaaattttggtataattgctgcttggaaaataaagctggttgcagtgccttcgaaatctacaattttctccgtcaagaaaaacatggaaatacacggattagtcaaactatttaacaagtggcaaaatattgcctacaaatatgataaagatctagtgttaatgacccatttcatcacaaagaacattactgacaatcacgggaagaataagacaactgttcacggttattttagcagcatctttcatggtggcgttgattcacttgtggatttgatgaataaatcttttccagaacttggaattaagaaaacagattgcaaagagttctcgtggattgatactactatcttttactcgggtgtcgtaaattttaacaccgcaaacttcaaaaaagaaattttgctagacaggagtgccggtaagaaaacggcattttctataaagttagactatgttaaaaaaccgattcctgaaactgcaatggtgaagattttggagaaattatacgaagaggatgtaggcgctgggatgtacgttctctatccatatggtggtattatggaagaaatatcagagtctgccatcccgtttccccatagagcgggtataatgtatgaattgtggtatacagcttcatgggaaaaacaagaggacaacgaaaagcacattaattgggttcgatcagtttacaatttcactacgccatacgtaagtcagaacccacgtttagcttacttaaattatagagatctggatctggggaaaactaaccatgcctcccctaataactacacccaagccaggatttggggcgaaaagtattttggcaaaaatttcaacagattggtaaaagtaaagacaaaggtcgacccaaataactttttccgcaatgagcagtccatacctccgttacctcttagacatcat

SEQ ID NO: 259 - DNA, 1551 bp, Artificial Sequence
  Synthetic
aaccccagggaaaatttcctaaaatgtttttccaagcacatacctaataacgttgctaatccaaaacttgtgtacactcagcatgatcaactctatatgtcattgttaaacagtaccattcaaaatctacgatttatctctgacacgacaccgaagccattagtcattgtaactccttcgaacaatagccatattcaagccacaatcctgtgctcaaaaaaggttgggttacagataagaacaagaagcggaggccatgatgcagagggtatgtcttatatttcacaagttccattcgtagtggtcgacttgcgtaacatgcactccataaaaattgatgttcatagtcaaactgcgtgggtcgaagctggtgccaccttgggtgaggtttactattggatcaatgaaaagaatgaaaacttatcctttcctggaggctactgtcccaccgtaggggtgggtggtcacttctctggtggaggttatggcgcattaatgcgcaattacgggcttgctgcggataatattatagatgcacatttggttaacgtagacggaaaagtgcttgacagaaaatcaatgggtgaggatttattttgggctatcagaggaggcggtggtgaaaattttggcataattgccgcatggaagattaaactggtcgctgtcccaagcaaatctactatattttctgtaaagaaaaatatggaaattcatgggttggttaagctcttcaataagtggcagaacatagcctataaatatgataaggatcttgtcctaatgacacactttatcacgaaaaatataacggacaaccacggcaaaaacaagactaccgttcatggttactttagttcgattttccatgggggcgtggatagcctggtggatctaatgaacaaaagttttcccgaattgggtatcaaaaagacagactgtaaggaattttcatggatcgatacgactattttctatagtggtgttgttaatttcaatacggctaattttaaaaaagagattcttttagacagatctgctgggaaaaagacagcattctcgatcaaattggattacgttaaaaagcctataccagaaaccgctatggtaaagatcctggaaaagttgtatgaggaagatgtcggagcagggatgtatgtgctgtatccatacggtggcattatggaagagataagcgagtcagcaattccgttcccacacagggcgggaataatgtacgaattatggtatactgctagttgggaaaaacaagaagataatgaaaaacatataaattgggtaagatccgtctacaactttactacaccttatgtttcgcagaacccgcgtctagcatacctgaattacagagacttagacttgggcaagactaatcatgcctctcctaacaattacacccaagcaaggatttggggtgaaaaatattttggaaaaaactttaatcggctagtaaaagtcaagacgaaagttgatcctaataactttttccgtaatgagcaatctattccaccccttcccttgcatcatcac

SEQ ID NO: 260 - DNA, 1551 bp, Artificial Sequence
  Synthetic
aacccacgtgagaactttttgaaatgtttctctaagcatatccctaacaatgtggctaacccaaagttagtttacacacagcacgatcaactatatatgagcattttgaactccactatccaaaatctgaggttcattagtgacaccacgcccaaaccattggttattgtaaccccttctgaaaactctcatatccaagctactatattatgttccaagaaggtcggcttgcaaattagaactagatcaggaggtcacgatgctgaaggtatgtcatacatttcccaagttccattcgttgttgtagacctaagaaatatgcactctatcaaaattgatgtccattctcaaacagcctgggtcgaagctggtgctaccttgggtgaagtttattactggattaacgaaaagaatgaaaacttgtcgttcccaggtggttactgtccaaccgtgggtgttggtggacactttagcggtggtggatacggcgccttgatgagaaactatggtttagctgctgacaatatcatcgatgcacaccttgtcaacgttgatggtaaggtattggacagaaaatcaatgggtgaagacttgttctgggctataagaggtggcggtggtgagaactttggtatcatcgctgcatggaagattaagttagttgccgtcccatctaagtccactatcttcagtgttaaaaagaacatggaaattcatggtttggtcaagctatttaataaatggcagaacatcgcttacaagtacgataaggacttagttttgatgacccattttataactaaaaacattactgataaccacggtaaaaataagactacagttcacggttatttctcctctatcttccatggtggagttgactctctggtcgacctaatgaacaagtccttcccagaattgggtattaagaagactgattgcaaagaattttcatggatcgataccaccattttctactctggcgtggttaactttaatacggctaactttaagaaggaaatattgttagaccgttcggccggtaagaaaaccgctttttctataaagttggattatgttaagaaacctattcctgaaacagccatggtcaagatcttagaaaaattgtacgaagaggatgtaggagctggtatgtacgttctttacccatatggtggtattatggaagaaatatctgagtctgccattccattcccacatagggcaggcattatgtacgaattgtggtatactgctagctgggaaaagcaagaagacaatgaaaaacacataaattgggttagaagtgtatacaatttcactaccccctacgtcagccaaaacccaagattggcctatctaaactaccgtgacctggacctaggtaaaactaaccacgcttcaccaaacaactacacccaagctagaatctggggagagaagtatttcggtaagaatttcaacagattggtcaaagtgaagaccaaggtcgatccaaataattttttcagaaacgagcaatctattcccccattaccaccacatcatcac

SEQ ID NO: 261 - DNA, 1551 bp, Artificial Sequence
  Synthetic
aacccacgtgagaactttttgaaatgtttctctaagcatatccctaacaatgtggctaacccaaagttagtttacacacagcacgatcaactatatatgagcattttgaactccactatccaaaatctgaggttcattagtgacaccacgcccaaaccattggttattgtaaccccttctcataactctcatatccaagctactatattatgttccaagaaggtcggcttgcaaattagaactagatcaggaggtcacgatgctgaaggtatgtcatacatttcccaagttccattcgttgttgtagacctaagaaatatgcactctatcaaaattgatgtccattctcaaacagcctgggtcgaagctggtgctaccttgggtgaagtttattactggattaacgaaaagaatgaaaacttgtcgttcccaggtggttactgtccaaccgtgggtgttggtggacactttagcggtggtggatacggcgccttgatgagaaactatggtttagctgctgacaatatcatcgatgcacaccttgtcaacgttgatggtaaggtattggacagaaaatcaatgggtgaagacttgttctgggctataagaggtggcggtggtgagaactttggtatcatcgctgcatggaagattaagttagttgccgtcccatctaagtccactatcttcagtgttaaaaagaacatggaaattcatggtttggtcaagctatttaataaatggcagaacatcgcttacaagtacgataaggacttagttttgatgacccattttataactaaaaacattactgataaccacggtaaaaataagactacagttcacggttatttctcctctatcttccatggtggagttgactctctggtcgacctaatgaacaagtccttcccagaattgggtattaagaagactgattgcaaagaattttcatggatcgataccaccattttctactctggcgtggttaactttaatacggctaactttaagaaggaaatattgttagaccgttcggccggtaagaaaaccgctttttctataaagttggattatgttaagaaacctattcctgaaacagccatggtcaagatcttagaaaaattgtacgaagaggatgtaggagctggtatgtacgttctttacccatatggtggtattatggaagaaatatctgagtctgccattccattcccacatagggcaggcattatgtacgaattgtggtatactgctagctgggaaaagcaagaagacaatgaaaaacacataaattgggttagaagtgtatacaatttcactaccccctacgtcagccaaaacccaagattggcctatctaaactaccgtgacctggacctaggtaaaactaaccacgcttcaccaaacaactacacccaagctagaatctggggagagaagtatttcggtaagaatttcaacagattggtcaaagtgaagaccaaggtcgatccaaataattttttcagaaacgagcaatctattcccccattaccaccacatcatcac

SEQ ID NO: 262 - DNA, 1551 bp, Artificial Sequence
  Synthetic
aacccacgtgagaactttttgaaatgtttctctaagcatatccctaacaatgtggctaacccaaagttagtttacacacagcacgatcaactatatatgagcattttgaactccactatccaaaatctgaggttcattagtgacaccacgcccaaaccattggttattgtaaccccttctaataactctcatatccaagctactatattatgttccaagaaggtcggcttgcaaattagaactagatcaggaggtcacgatgctgaaggtatgtcatacatttcccaagttccattcgttgttgtagacctaagaaatatgcactctatcaaaattgatgtccattctcaaacagcctgggtcgaagctggtgctaccttgggtgaagtttattactggattaacgaaaagaatgaaaacttgtcgttcccaggtggttactgtccaaccgtgggtgttggtggacactttagcggtggtggatacggcgccttgatgagaaactatggtttagctgctgacaatatcatcgatgcacaccttgtcaacgttgatggtaaggtattggacagaaaatcaatgggtgaagacttgttctgggctataagaggtggcggtggtgagaactttggtatcatcgctgcatggaagattaagttagttgccgtcccatctaagtccactatcttcagtgttaaaaagaacatggaaattcatggtttggtcaagctatttaataaatggcagaacatcgcttacaagtacgataaggacttaacattgatgacccattttataactaaaaacattactgataaccacggtaaaaataagactacagttcacggttatttctcctctatcttccatggtggagttgactctctggtcgacctaatgaacaagtccttcccagaattgggtattaagaagactgattgcaaagaattttcatggatcgataccaccattttctactctggcgtggttaactttaatacggctaactttaagaaggaaatattgttagaccgttcggccggtaagaaaaccgctttttctataaagttggattatgttaagaaacctattcctgaaacagccatggtcaagatcttagaaaaattgtacgaagaggatgtaggagctggtatgtacgttctttacccatatggtggtattatggaagaaatatctgagtctgccattccattcccacatagggcaggcattatgtacgaattgtggtatactgctagctgggaaaagcaagaagacaatgaaaaacacataaattgggttagaagtgtatacaatttcactaccccctacgtcagccaaaacccaagattggcctatctaaactaccgtgacctggacctaggtaaaactaaccacgcttcaccaaacaactacacccaagctagaatctggggagagaagtatttcggtaagaatttcaacagattggtcaaagtgaagaccaaggtcgatccaaataattttttcagaaacgagcaatctattcccccattaccaccacatcatcac

SEQ ID NO: 263 - DNA, 1551 bp, Artificial Sequence
  Synthetic
aatccgcaagagaactttttaaagtgcttctctcagtacatacccacaaacgtaactaatgcgaaattggtctatacgcaacacgatcagttttatatgtcgatcctaaatagtaccattcaaaacctgaggttcacatcagacactacgccaaaacctcttgttattatcaccccattaaatgttagccatatacaaggcactattttgtgttccaagaaagtgggactccaaattcgtacaagaagcgggggtcatgatgctgaaggtatgtcatacatatctcaggtcccttttgttgtagtggatctacgaaatatgcactcgattaaaatcgacgttcatagtcaaacagcatgggtggaagccggtgctactttaggggaagtatattactggattaacgagaagaatgaaaatttatccttcccaggcggatattgtcccactgttggtgttggtggacatttttctggaggtgggtatggcgcactcatgagaaattacggtttggccgctgataacattatagatgctcaccttgtcaatgtagacggtaaagttctggatagaaagtcaatgggagaggatttgttttgggcaatacgcggaggcggtggcgaaaattttggtatcattgccgcgtggaaaatcaaattggtggcagttccatctaagtccaccatattcagtgtaaaaaagaatatggaaatacatggtttagtcaaactattcaacaagtggcagaacattgcttataagtacgataaagacttagtcctcatgactcattttattactaagaatatcacagataaccatggcaaaaataaaaccacggtgcacggctacttttcgtccattttccatggaggtgttgattcattggttgacttgatgaacaagtccttcccggaattaggaattaaaaaaaccgattgcaaagaattttcttggatcgacacaacaattttttatagcggtgtagtaaatttcaacactgcgaactttaagaaagagatcttgctagacagaagtgcaggcaagaaaacagctttttctataaagcttgattacgtcaaaaagcctattcctgaaacggctatggtaaaaatactggagaagctctatgaagaggatgttggtgccgggatgtacgttctgtatccatatggaggtattatggaagaaatctcagagagtgccattcccttcccacacagggcaggtattatgtatgaactatggtacacagcttcatgggaaaaacaggaagataatgaaaaacacatcaattgggtgagaagtgtctataacttcaccactccctacgtttctcaaaatccgcggttagcttatctaaattaccgtgatttagatcttgggaaaactaaccatgcgtcaccaaataattatacgcaagcccgaatttggggagaaaaatactttggcaaaaacttcaatagattggttaaggtgaaaactaaggtcgatcctaataactttttccgaaatgagcaatcgatacctccattgcctctgaggcaccat

SEQ ID NO: 264 - DNA, 1551 bp, Artificial Sequence
  Synthetic
aaccctagggaaaatttcctaaaatgctttagcaagcacataccaaataacgtcgcaaatccaaaattggtttatacgcagcatgaccaactgtacatgtcgctccttaactcaactatccaaaatttaagatttattagtgataccacaccgaagcccctagtgattgttacaccttctaataactcccatatccaggccactattttatgttctaaaaaggtcggtttgcaaataagaacccgcagtgggggacacgatgctgagggcatgtcatatatctcgcaagtaccattcgttgtagttgatttgcgtaatatgcattccattaaaatagacgtgcattctcaaactgcgtgggtggaagcaggagctacactaggtgaagtatactattggattaacgagaaaaatgaaaatctttcatttccgggtggttactgtcctacggttggcgtcgggggtcatttctctggcggaggttatggagccttaatgagaaactacggtcttgcagctgataatatcatagatgcccacctggtaaatgttgacggtaaggttttagatcgaaaaagtatgggggaagatttattttgggctattaggggcgggggtggagaaaattttggcattatcgcggcttggaaaattaagctggtggcagtcccatccaagtcgactatctttagcgtcaagaaaaacatggagatacatggtttggtcaaattgttcaacaagtggcaaaacatagcgtataaatatgacaaagatctagttttgatgacccatttcattacaaaaaacataactgacaatcacgggaagaataagacaacagtacacggttacttttcctcaattttccatggtggcgttgattctctcgtcgatttaatgaacaagagttttccagaattgggaattaagaaaacggactgcaaagaatttagctggatcgacaccactatattctacagtggtgtagtaaatttcaataccgctaattttaaaaaagagatattgctcgatagatctgctggcaaaaaaacagcattttcaatcaaactcgattatgttaaaaagcccattcccgaaactgccatggttaaaattttagaaaagttatacgaggaagatgtgggtgcaggtatgtatgttctttatccctatggcgggataatggaagaaatttcagagtccgctataccattccctcatcgggcaggcatcatgtacgagctttggtacacagccagttgggaaaagcaggaagataatgaaaaacacataaattgggtcagatcagtgtataactttacaactccttatgtgtctcaaaatccacgtcttgcttatctaaattaccgagacttggacttgggaaaaactaatcacgccagcccgaacaattatacccaagctaggatttggggcgagaaatacttcggtaaaaacttcaatagacttgtaaaagtcaagaccaaagttgacccgaacaacttttttagaaatgagcagtctattcctcctttaccactgcatcatcac

SEQ ID NO: 265 - DNA, 1551 bp, Artificial Sequence
  Synthetic
aatccacgtgagaactttcttaaatgcttctccaagcatattcccaataacgttgcaaatcctaaactggtctatacgcaacacgaccagctctacatgtcaatcttgaatagcaccatacaaaacttaagatttatttcggatacaactccgaagccattggtgatcgtaacaccaagtaataattctcatattcaggccactatattatgttctaaaaaggttggactacaaattaggaccagatcaggtgggcatgatgcggaaggcatgtcgtatatcagtcaagtccctttcgttgtagtggaccttcgaaacatgcactccataaaaattgatgttcattcacaaactgcttgggtggaagctggagcaacattaggtgaagtttactattggataaacgaaaaaaacgagaatttgtcttttcctggtggttattgtccaacggtaggcgtgggcggtcactttagtggaggtggttacggggccctgatgagaaattatggactagctgccgataatattatcgatgcacatctcgtgaacgtcgacggcaaagttttggaccgcaagtccatgggtgaagatcttttctgggcgatcagaggaggaggcggggagaattttggtattatagctgcatggaaaatcaagttagtcgatgtaccatcaaaatctacaattttctctgttaaaaagaatatggaaattcacggtttagtcaaattatttaacaagtggcaaaacatagcttacaagtatgataaagacctggttttgatgacgcatttcatcactaaaaatattacggataatcatggcaagaataagaccactgtacatgggtacttcagctccatatttcacggtggggttgatagtctagtagacttgatgaataaaagcttccccgaactaggaattaaaaaaacagattgtaaggaattttcttggatcgatactaccatattttactccggtgttgtcaactttaacaccgcaaattttaaaaaagagatcctgttggataggtctgcgggtaagaaaacagctttctctattaagctcgactatgtaaaaaagccgattcctgagactgccatggtcaaaatattagaaaagctttacgaagaggatgtcggggcaggtatgtatgttttgtatccttatggaggtatcatggaagaaattagcgaatcagctatcccgtttccacaccgagcaggaataatgtatgaactatggtacacagcttcatgggaaaaacaggaagataatgagaaacatattaattgggttagatcggtatataactttacgactccatacgtgagtcagaacccccgcctcgcgtacttaaactatcgggatcttgacttgggtaagaccaatcatgccagcccaaacaattacacacaagcgagaatttggggcgaaaaatattttggtaagaattttaatcggcttgttaaggtcaagacgaaagtcgatcctaataatttctttagaaatgaacaatccataccacctttaccccctcatcaccat

SEQ ID NO: 266 - DNA, 1551 bp, Artificial Sequence
  Synthetic
aatccacgcgagaactttcttaagtgcttctccaaacatatacctaataacgtcgccaatcccaaattggtttatacgcaacacgaccagctatacatgtctattctgaacagtacaatccaaaatttaaggtttatttcagataccactccgaagccactcgtaatagtgactcctagcaataactcgcatattcaagcaacaatcttatgttctaaaaaggtaggattgcaaatccgtaccagatcaggtggccacgatgcggaaggtatgtcatatatatctcaggttccattcgttgtggtagatctaagaaatatgcattccattaaaattgacgttcatagtcaaactgcttgggtcgaagctggggcaacattaggtgaggtgtactattggattaacgaaaaaaatgaaaatttgagctttcccggaggctattgtcctacagttggggtaggtggtcacttctcaggtggaggatacggcgccttgatgagaaactacgggctggctgctgataatataatagacgcacatctggttaacgtcgacggtaaggtcttagatcgaaaatcgatgggcgaagatttattttgggcgattaggggtggcggtggtgaaaatttcggtatcatagcagcatggaagattaagcttgtcgacgtgccatctaaaagtactattttttcagtaaaaaaaaatatggagatccatggactcgtgaagttgttcaacaagtggcagaatattgcctataaatacgataaagatcttgttctaatgacgcactttatcaccaagaacataacagataatcatggcaaaaataaaactactgttcatggctatttttcgtccattttccacgggggcgtagactctctggttgatttaatgaacaaatcttttccagaattgggtataaagaaaacagattgcaaggaattttcatggattgacacaacaattttctactccggagtcgtgaattttaacaccgctaattttaaaaaggagattctccttgatcgtagtgccggtaaaaagacggctttctcgatcaaactagactatgttaagaaaccgatccccgagactgctatggtcaaaatacttgaaaagttatatgaagaagatgttggggcagggatgtacgtcctctatccgtacggtggcattatggaagagattagcgaaagcgcaatcccatttcctcatagagcgggaatcatgtacgaattgtggtatactgcctcatgggaaaaacaagaggataatgagaaacacatcaactgggttcgcagtgtttataattttacgacaccttatgtttctcaaaacccaagattggcttatttaaattacagagatttggacttaggtaagaccaatcatgcctccccaaataactatactcaggcaaggatttggggtgaaaagtacttcgggaaaaattttaatcgcttagtcaaagttaagactaaggttgaccccaacaatttctttcggaacgaacaaagtatccctccattacctccacatcaccat

SEQ ID NO: 267 - DNA, 1554 bp, Artificial Sequence
  Synthetic
gcgaatccacgtgagaacttcctgaagtgtttttccaaacatattccgaataacgtggccaatcccaaattggtatacacacagcacgatcaactatatatgtcattacttaacagcaccatacaaaatttacggtttatctctgacactacgccaaagcctttggttattgttactccttcgaataactctcatatacaagctacaatcctctgctcaaaaaaggtcggccttcagattcgcactaggagtgggggacacgatgcagaaggtatgagctacatcagtcaagtcccattcgtagttgtggacttaagaaatatgcattctattaaaatagatgttcattcccaaaccgcttgggttgaagcaggagccacattgggtgaagtctattattggattaacgagaaaaatgaaaatctaagttttccaggtggctattgtcctacggtgggtgttggaggtcacttctctggtggcgggtacggagcattaatgagaaattacggcttggctgcggataatataattgacgctcatttggtaaacgtggatggtaaagttctggatagaaagtcaatgggtgaagatctcttttgggccatccgagggggaggtggagagaatttcggcataattgcagcttggaagattaaacttgttgccgtacccagcaaatcaacgatttttagtgtcaagaaaaacatggaaatacatggtcttgtaaagctgtttaacaaatggcagaacattgcttataagtatgacaaggatttagttttgatgactcacttcatcacaaaaaatattaccgacaatcatggaaagaacaaaactacagttcatgggtacttttcgtcaatttttcacggtggcgtggattcgttagtagatttgatgaataaatccttcccggaactaggtatcaaaaaaacagattgcaaagaattttcatggatcgacacaacgatcttctactctggtgtcgtcaacttcaacactgccaattttaagaaagaaatactgctcgacaggtctgcgggaaaaaagaccgcattttcaattaaattggattatgttaaaaaacctataccagagactgctatggtgaagatcctcgaaaagttatacgaggaagatgttggagccggcatgtatgtcttgtacccctatggtggtataatggaagaaattagtgagagtgcgattccgtttccacatagagctggaatcatgtatgagttatggtataccgccagctgggaaaaacaagaagataacgaaaaacacataaattgggtaagatccgtttacaatttcactaccccatacgtttcacaaaatcctcgtctagcatatttgaactaccgcgaccttgatctaggcaagacgaatcatgcatctcctaataattatacccaggcgagaatctggggcgaaaaatactttggtaagaattttaaccgtttagttaaggtgaaaaccaaggtcgacccgaacaattttttcaggaatgaacagagtatcccaccactgcctttacatcatcac

SEQ ID NO: 268 - DNA, 1554 bp, Artificial Sequence
  Synthetic
gcaaatccacaagagaacttcttgaaatgcttttcgcagtatatacctaccaatgttactaacgctaagctggtgtacacgcaacacgaccaattttatatgagcatccttaattcaacaattcagaacctaagattcacttccgatacaacccccaaaccattagtaatcattactccgttaaatgtcagtcatatacaaggaaccattctttgtagtaagaaagttggtttgcaaatccgtacacgctctgggggccatgatgcggaaggtatgtcttacatttcacaggtcccttttgttgtggtagacctgaggaatatgcactctataaagattgatgttcattcccaaacggcctgggtggaagctggcgccactctaggtgaagtatattattggataaacgaaaaaaacgagaatttgagtttccccggaggttactgtccaacagttggggttggtggacacttttcgggcggaggctacggtgcattaatgagaaattatggattggctgcggataacatcattgacgcacatctggtaaatgtcgatgggaaggtcctcgatagaaaatcaatgggtgaagatttgttttgggctatccgaggtggtggaggcgaaaattttggtattatagctgcctggaaaattaagttagtagcagttccttccaagtccactatcttctctgtgaaaaagaatatggaaatacatggacttgtcaaactattcaacaaatggcaaaacattgcttataaatatgacaaagatttagttttaatgacacatttcattacaaagaatataacggacaatcatggtaagaataagacaacggttcacggctactttagttcaatttttcatggaggtgttgatagcttagtggatttgatgaacaaatctttcccggagctaggcattaaaaagaccgattgcaaggaattttcgtggatagacactactatcttctattcaggtgttgtgaattttaataccgcgaattttaaaaaggaaatcctcctcgatcggagtgccgggaaaaagacggcattttctataaagctagattatgtaaaaaaaccaattccagagactgctatggtaaaaattttagagaagttgtacgaagaggacgtgggggctggtatgtacgttctgtatccttacggcggtatcatggaagaaatatcggaaagtgcaatccccttcccacatagggcgggcattatgtatgaactttggtacaccgcaagctgggagaaacaggaagataatgagaaacacatcaactgggtaagatcagtttataactttaccactccatatgtctcacaaaaccctcgattggcgtacctaaactacagagacttagacttaggtaaaactaatcacgcctctccgaacaattatactcaagctcgtatatggggtgaaaagtattttgggaagaatttcaacagattggtgaaggtgaaaaccaaagttgatccgaataactttttccgtaatgaacagtccattcccccattgcctcttagacatcat

SEQ ID NO: 269 - DNA, 1551 bp, Artificial Sequence
  Synthetic
aacccgcaagaaaactttctaaaatgcttttctgaatacattcctaacaaccctgccaacccgaagtttatctacacacaacacgatcaattgtatatgagcgtgttgcagagtacaatacagaacctgaggtttacatccgacacaacgccgaaaccgctagtgatcgtcacaccctccaacgtaagccacattcaggcaagcattttatgcagcaagaaagtcggactgcagataaggacgaggtccggaggacacgacgccgaagggatgagctatatctcccaggtaccttttgtggtggtagacttgagaaatatgcactctatcaagatagacgttcactcccaaaccgcttgggttgaggcgggagccacccttggtgaggtctactactggatcaacgaaaagaatgaaaattttagctttcctgggggatattgcccaactgtaggtgttggcggccacttctcaggaggcggttatggggccttgatgcgtaactacggacttgcggccgacaacattatagacgcacatctagtgaatgtagacggcaaagttttagacaggaagagcatgggtgaggatcttttttgggcaattagaggcggagggggagaaaattttggaattatcgctgcttggaaaattaagctagttgcggtaccgagcaaaagcactatattctctgtaaaaaagaacatggagatacatggtttggtgaagctttttaataagtggcaaaacatcgcgtacaagtacgacaaagatctggttctgatgacgcattttataacgaaaaatatcaccgacaaccacggaaaacaaaaaaccacagtacatggctacttctctagtatatttcatgggggagtcgattctctggttgatttaatgaacaaatcattcccagagttgggtataaagaagacagactgtaaggagttctcttggattgacacaactatattctattcaggcgtagtcaactttaacacggcgaatttcaaaaaagagatccttctggacagatccgcaggtaagaaaactgcgttctctatcaaattggactatgtgaagaagcctattcccgaaaccgcgatggtcaagatacttgagaaattatacgaggaagatgtgggagttggaatgtacgtactttatccctatggtgggataatggaagaaatcagcgagagcgccattccatttccccatcgtgccggcatcatgtacgagctgtggtatactgcgagttgggagaagcaagaagacaacgaaaagcacattaactgggtcagatcagtttacaatttcaccaccccatacgtgtcccagaatccgcgtctggcttacttgaactaccgtgatcttgacctgggtaaaacgaacccggagtcacccaacaattacactcaagctagaatctggggagagaaatactttgggaagaacttcaacaggttagtaaaggttaaaaccaaggcagatccaaacaacttttttagaaatgaacaatccattcccccgctacccccgcaccatcac

SEQ ID NO: 270 - DNA, 1551 bp, Artificial Sequence
  Synthetic
aacccgcaagaaaactttctaaaatgcttttctgaatacattcctaacaaccctgccaacccgaagtttatctacacacaacacgatcaattgtatatgagcgtgttgcagagtacaatacagaacctgaggtttacatccgacacaacgccgaaaccgctagtgatcgtcacaccctccaacgtaagccacattcaggcaagcattttatgcagcaagaaagtcggactgcagataaggacgaggtccggaggacacgacgccgaagggatgagctatatctcccaggtaccttttgtggtggtagacttgagaaatatgcactctatcaagatagacgttcactcccaaaccgcttgggttgaggcgggagccacccttggtgaggtctactactggatcaacgaaaagaatgaaaattttagctttcctgggggatattgcccaactgtaggtgttggcggccacttctcaggaggcggttatggggccttgatgcgtaactacggacttgcggccgacaacattatagacgcacatctagtgaatgtagacggcaaagttttagacaggaagagcatgggtgaggatcttttttgggcaattagaggcggagggggagaaaattttggaattatcgctgcttggaaaattaagctagttgcggtaccgagcaaaagcactatattctctgtaaaaaagaacatggagatacatggtttggtgaagctttttaataagtggcaaaacatcgcgtacaagtacgacaaagatctggttctgatgacgcattttataacgaaaaatatcaccgacaaccacggaaaacaaaaaaccacagtacatggctacttctctagtatatttcatgggggagtcgattctctggttgatttaatgaacaaatcattcccagagttgggtataaagaagacagactgtaaggagttctcttggattgacacaactatattctattcaggcgtagtcaactttaacacggcgaatttcaaaaaagagatccttctggacagatccgcaggtaagaaaactgcgttctctatcaaattggactatgtgaagaagcctattcccgaaaccgcgatggtcaagatacttgagaaattatacgaggaagatgtgggagttggaatgtacgtactttatccctatggtgggataatggaagaaatcagcgagagcgccattccatttccccatcgtgccggcatcatgtacgagctgtggtatactgcgagttgggagaagcaagaagacaacgaaaagcacattaactgggtcagatcagtttacaatttcaccaccccatacgtgtcccagaatccgcgtctggcttacttgaactaccgtgatcttgacctgggtaaaacgaacccggagtcacccaaccaatacactcaagctagaatctggggagagaaatactttgggaagaacttcaacaggttagtaaaggttaaaaccaaggcagatccaaacaacttttttagaaatgaacaatccattcccccgctacccccgcaccatcac

SEQ ID NO: 271 - DNA, 1551 bp, Artificial Sequence
  Synthetic
aacccgcaagaaaactttctaaaatgcttttctgaatacattcctaacaaccctgccaacccgaagtttatctacacacaacacgatcaattgtatatgagcgtgttgcagagtacaatacagaacctgaggtttacatccgacacaacgccgaaaccgctagtgatcgtcacaccctccaacgtaagccacattcaggcaagcattttatgcagcaagaaagtcggactgcagataaggacgaggtccggaggacacgacgccgaagggatgagctatatctcccaggtaccttttgtggtggtagacttgagaaatatgcactctatcaagatagacgttcactcccaaaccgcttgggttgaggcgggagccacccttggtgaggtctactactggatcaacgaaaagaatgaaaattttagctttcctgggggatattgcccaactgtaggtgttggcggccacttctcaggaggcggttatggggccttgatgcgtaactacggacttgcggccgacaacattatagacgcacatctagtgaatgtagacggcaaagttttagacaggaagagcatgggtgaggatcttttttgggcaattagaggcggagggggagaaaattttggaattatcgctgcttggaaaattaagctagttgcggtaccgagcaaaagcactatattctctgtaaaaaagaacatggagatacatggtttggtgaagctttttaataagtggcaaaacatcgcgtacaagtacgacaaagatctggttctgatgacgcattttataacgaaaaatatcaccgacaaccacggaaaacaaaaaaccacagtacatggctacttctctagtatatttcatgggggagtcgattctctggttgatttaatgcaaaaatcattcccagagttgggtataaagaagacagactgtaaggagttctcttggattgacacaactatattctattcaggcgtagtcaactttaacacggcgaatttcaaaaaagagatccttctggacagatccgcaggtaagaaaactgcgttctctatcaaattggactatgtgaagaagcctattcccgaaaccgcgatggtcaagatacttgagaaattatacgaggaagatgtgggagttggaatgtacgtactttatccctatggtgggataatggaagaaatcagcgagagcgccattccatttccccatcgtgccggcatcatgtacgagctgtggtatactgcgagttgggagaagcaagaagacaacgaaaagcacattaactgggtcagatcagtttacaatttcaccaccccatacgtgtcccagaatccgcgtctggcttacttgaactaccgtgatcttgacctgggtaaaacgaacccggagtcacccaacaattacactcaagctagaatctggggagagaaatactttgggaagaacttcaacaggttagtaaaggttaaaaccaaggcagatccaaacaacttttttagaaatgaacaatccattcccccgctacccccgcaccatcac

SEQ ID NO: 272 - DNA, 1551 bp, Artificial Sequence
  Synthetic
aacccacgtgagaactttttgaaatgtttctctaagcatatccctaacaatgtggctaacccaaagttagtttacacacagcacgatcaactatatatgagcattttgaactccactatccaaaatctgaggttcattagtgacaccacgcccaaaccattggttattgtaaccccttctaataactctcatatccaagctactatattatgttccaagaaggtcggcttgcaaattagaactagatcaggaggtcacgatgctgaaggtatgtcatacatttcccaagttccattcgttgttgtagacctaagaaatatgcactctatcaaaattgatgtccattctcaaacagcctgggtcgaagctggtgctaccttgggtgaagtttattactggattaacgaaaagaatgaaaacttgtcgttcccaggtggttactgtccaaccgtgggtgttggtggacactttagcggtggtggatacggcgccttgatgagaaactatggtttagctgctgacaatatcatcgatgcacaccttgtcaacgttgatggtaaggtattggacagaaaatcaatgggtgaagacttgttctgggctataagaggtggcggtggtgagaactttggtatcatcgctgcatggaagattaagttagttgccgtcccatctaagtccactatcttcagtgttaaaaagaacatggaaattcatggtttggtcaagctatttaataaatggcagaacatcgcttacaagtacgataaggacttagttttgatgacccattttataactaaaaacattactgataaccacggtaaaaataagactacagttcacggttatttctcctctatcttccatggtggagttgactctctggtcgacctaatgaacaagtccttcccagaattgggtattaagaagactgattgcaaagaattttcatggatcgataccaccattttctactctggcgtggttaactttaatacggctaactttaagaaggaaatattgttagaccgttcggccggtaagaaaaccgctttttctataaagttggattatgttaagaaacctattcctgaaacagccatggtcaagatcttagaaaaattgtacgaagaggatgtaggagctggtatgtacgttctttacccatatggtggtattatggaagaaatatctgagtctgccattccattcccacatagggcaggcattatgtacgaattgtggtatactgctagctgggaaaagcaagaagacaatgaaaaacacataaattgggttagaagtgtatacaatttcactaccccctacgtcagccaaaacccaagattggcctatctaaactaccgtgacctggacctaggtaaaactaacgatgcttcaccaaacaactacacccaagctagaatctggggagagaagtatttcggtaagaatttcaacagattggtcaaagtgaagaccaaggtcgatccaaataattttttcagaaacgagcaatctattcccccattaccaccacatcatcac

SEQ ID NO: 273 - DNA, 1551 bp, Artificial Sequence
  Synthetic
aacccgcaagaaaactttctaaaatgcttttctgaatacattcctaacaaccctgccaacccgaagtttatctacacacaacacgatcaattgtatatgagcgtgttgcagagtacaatacagaacctgaggtttacatccgacacaacgccgaaaccgctagtgatcgtcacaccctccaacgtaagccacattcaggcaagcattttatgcagcaagaaagtcggactgcagataaggacgaggtccggaggacacgacgccgaagggatgagctatatctcccaggtaccttttgtggtggtagacttgagaaatatgcactctatcaagatagacgttcactcccaaaccgcttgggttgaggcgggagccacccttggtgaggtctactactggatcaacgaaaagaatgaacaatttagctttcctgggggatattgcccaactgtaggtgttggcggccacttctcaggaggcggttatggggccttgatgcgtaactacggacttgcggccgacaacattatagacgcacatctagtgaatgtagacggcaaagttttagacaggaagagcatgggtgaggatcttttttgggcaattagaggcggagggggagaaaattttggaattatcgctgcttggaaaattaagctagttgcggtaccgagcaaaagcactatattctctgtaaaaaagaacatggagatacatggtttggtgaagctttttaataagtggcaaaacatcgcgtacaagtacgacaaagatctggttctgatgacgcattttataacgaaaaatatcaccgacaaccacggaaaaaacaaaaccacagtacatggctacttctctagtatatttcatgggggagtcgattctctggttgatttaatgaacaaatcattcccagagttgggtataaagaagacagactgtaaggagttctcttggattgacacaactatattctattcaggcgtagtcaactttaacacggcgaatttcaaaaaagagatccttctggacagatccgcaggtaagaaaactgcgttctctatcaaattggactatgtgaagaagcctattcccgaaaccgcgatggtcaagatacttgagaaattatacgaggaagatgtgggagttggaatgtacgtactttatccctatggtgggataatggaagaaatcagcgagagcgccattccatttccccatcgtgccggcatcatgtacgagctgtggtatactgcgagttgggagaagcaagaagacaacgaaaagcacattaactgggtcagatcagtttacaatttcaccaccccatacgtgtcccagaatccgcgtctggcttacttgaactaccgtgatcttgacctgggtaaaacgaacccggagtcacccaacaattacactcaagctagaatctggggagagaaatactttgggaagaacttcaacaggttagtaaaggttaaaaccaaggcagatccaaacaacttttttagaaatgaacaatccattcccccgctacccccgcaccatcac

SEQ ID NO: 274 - DNA, 1551 bp, Artificial Sequence
  Synthetic
aacccacgtgagaactttttgaaatgtttctctaagcatatccctaacaatgtggctaacccaaagttagtttacacacagcacgatcaactatatatgagcattttgaactccactatccaaaatctgaggttcattagtgacaccacgcccaaaccattggttattgtaaccccttctaataactctcatatccaagctactatattatgttccaagaaggtcggcttgcaaattagaactagatcaggaggtcacgatgctgaaggtatgtcatacatttcccaagttccattcgttgttgtagacctaagaaatatgcactctatcaaaattgatgtccattctcaaacagcctgggtcgaagctggtgctaccttgggtgaagtttattactggattaacgaaaagaatgaaaacttgtcgttcccaggtggttactgtccaaccgtgggtgttggtggacactttagcggtggtggatacggcgccttgatgagaaactatggtttagctgctgacaatatcatcgatgcacaccttgtcaacgttgatggtaaggtattggacagaaaatcaatgggtgaagacttgttctgggctataagaggtggcggtggtgagaactttggtatcatcgctgcatggaagattaagttagttgccgtcccatctaagtccactatcttcagtgttaaaaagaacatggaaattcatggtttggtcaagctatttaataaatggcagaacatcgcttacaagtacgataaggacttagttttgatgacccattttataactaaaaacattactgataaccacggtaaaaataagactacagttcacggttatttctcctctatcttccatggtggagttgactctctggtcgacctaatgaacaagtccttcccagaattgggtattaagaagactgattgcaaagaattttcatggatcgataccaccattttctactctggcgtggttaactttaatacggctaactttaagaaggaaatattgttagaccgttcggccggtaagaaaaccgctttttctataaagttggattatgttaagaaacctattcctgaaacagccatggtcaagatcttagaaaaattgtacgaagaggatgtaggagctggtatgtacgttctttacccatatggtggtattatggaagaaatatctgagtctgccattccattcccacatagggcaggcattatgtacgaattgtggtatactgctagctgggaaaagcaagaagacaatgaaaaacacataaattgggttagaagtgtatacaatttcactaccccctacgtcagccaaaacccaagattggcctatctaaactaccgtgacctggacctaggtaaaactaacgaggcttcaccaaacaactacacccaagctagaatctggggagagaagtatttcggtaagaatttcaacagattggtcaaagtgaagaccaaggtcgatccaaataattttttcagaaacgagcaatctattcccccattaccaccacatcatcac

SEQ ID NO: 275 - DNA, 1551 bp, Artificial Sequence
  Synthetic
aatcctcgtgagaactttttaaagtgtttcagcaaacacatcccaaataacgtcgcgaatccgaaactcgtgtatactcaacatgaccagctatacatgtcacttttgaacagtacgatacaaaatctgaggtttatttctgataccacacctaagccattggttattgttactccctctaataattcccatatccaggccacaattttatgctcgaaaaaagtaggtctacaaatacgcacgagatcaggaggccatgatgctgaagggatgtcttatatttcccaagtaccattcgttgtggtcgacttgagaaacatgcacagtattaagatagatgttcattcacaaactgcatgggtcgaagctggtgcaacattaggcgaggtgtactattggatcaatgaaaaaaatgaaaacttatcttttccgggtggatactgtcctaccgtaggtgttggaggtcacttctctggagggggctatggtgccctgatgcgaaactatggtcttgctgcggataacataatagacgcacatttggtaaatgttgatggtaaggtgctagatagaaaatcgatgggggaagatctcttttgggctattaggggtggaggcggcgagaatttcgggatcattgctgcatggaagatcaaattagtcgcagttccatccaagagcactatcttttcagtcaaaaaaaatatggaaattcatggcttggtcaagttgttcaacaaatggcagaacatagcttacaaatatgacaaagatcttgttttgatgacacattttataaccaagaatattactgacaaccacggtaagaataagacgacagtacacggttatttttccagtatttttcatgggggagttgattcacttgtggatttaatgaataaaagttttcctgagctgggtattaaaaaaacagactgcaaggaatttagttggatcgacactaccatcttctactcaggtgttgtgaatttcaacactgcaaacttcaaaaaggaaattctacttgatagatccgccggtaaaaagacggcgttttctatcaagttagattacgtgaaaaaaccaattcccgaaacagctatggttaagatattagaaaaattatacgaggaggacgttggtgccggtatgtatgtcttatatccttatggcggtattatggaagaaatttctgagagcgctattccatttccacatagagcaggaataatgtatgaattgtggtatacggcttcgtgggaaaaacaagaagataatgaaaaacatataaactgggtaaggtctgtatacaatttcacaactccttacgtaagccagaatccgaggctagcgtacctgaactaccgtgacttagatcttggcaaaaccaaccacgcctcgccaaataattatacccaagccagaatttggggcgaaaagtactttggcaagaatttcaatcggttggtgaaggtcaagactaaagtcgaccccaataacttttttcgaaatgaacagtcgatccctcccctgccactacatcaccac

SEQ ID NO: 276 - DNA, 1551 bp, Artificial Sequence
  Synthetic
aacccacgtgaaaatttcctgaagtgtttttccaaacacatacccaataacgtagcaaatcctaaattggtgtacacccaacatgatcagctatatatgagcatcctcaattctacgattcaaaaccttcgatttatttcggacactacaccgaagccattagttatagttacacctagtaataactctcatatccaagccactattttatgctcaaaaaaagtcggcttgcagattagaaccaggtcagggggacacgatgcggagggtatgagttatatctcgcaagttccattcgtagtggtcgacttgagaaatatgcatagcataaagattgatgttcactcccaaacggcttgggtagaagctggtgcaacattaggtgaagtttactattggataaacgagaaaaatgaaaacctatcttttcctggaggctactgtcctactgtcggtgtaggaggtcatttctctggtggtgggtatggcgccttgatgcgcaattacgggctggctgcggataatattatcgacgcacatcttgtcaacgtagatggaaaagtgttagatagaaagtcaatgggtgaggatctcttttgggccattaggggaggtggaggcgaaaattttggcatcattgcagcttggaagataaaattagttgctgttccctccaaaagtactattttcagcgttaagaagaatatggaaatacatgggttggtcaaattgttcaataagtggcagaacatagcctataaatatgataaagacctagtcctaatgacacattttattacaaaaaacattacggacaatcacggtaaaaacaagaccaccgttcatggttatttttcgtcaatctttcatggtggtgtcgattctttagtggatttgatgaataagtccttcccggagcttggaataaaaaaaacagactgcaaggaattttcatggatcgatactacaatcttctactccggtgtagtaaattttaacactgctaattttaaaaaggaaattttgttggacagatcagctggcaaaaaaaccgcattctctatcaagttagattacgttaagaagccaattcccgaaactgcaatggtgaagatacttgaaaaattatacgaggaagatgttggggcgggtatgtatgtgctatacccatatggtggcattatggaagagataagtgagagtgcgatcccttttccccacagagcaggaataatgtatgaactttggtatacagcctcttgggaaaaacaagaagataatgaaaaacatattaactgggtcaggagcgtatataatttcacgactccatacgtttctcaaaacccgcgtcttgcttacctgaactatagagacttagatttagggaaaactaatcatgccagcccgaataattacacccaagcgagaatttggggagagaagtattttggcaaaaactttaatcggctcgtgaaagttaagactaaagttgaccctaacaattttttcagaaatgaacagtccattccacctctcccaccacatcaccat

SEQ ID NO: 277 - DNA, 1551 bp, Artificial Sequence
  Synthetic
aacccacgtgagaactttttgaaatgtttctctaagcatatccctaacaatgtggctaacccaaagttagtttacacacagcacgatcaactatatatgagcattttgaactccactatccaaaatctgaggttcattagtgacaccacgcccaaaccattggttattgtaaccccttctaataactctcatatccaagctactatattatgttccaagaaggtcggcttgcaaattagaactagatcaggaggtcacgatgctgaaggtatgtcatacatttcccaagttccattcgttgttgtagacctaagaaatatgcactctatcaaaattgatgtccattctcaaacagcctgggtcgaagctggtgctaccttgggtgaagtttattactggattaacgaaaagaatgaaaacttgtcgttcccaggtggttactgtccaaccgtgggtgttggtggacactttagcggtggtggatacggcgccttgatgagaaactatggtttagctgctgacaatatcatcgatgcacaccttgtcaacgttgatggtaaggtattggacagaaaatcaatgggtgaagacttgttctgggctataagaggtggcggtggtgagaactttggtatcatcgctgcatggaagattaagttagttgccgtcccatctaagtccactatcttcagtgttaaaaagaacatggaaattcatggtttggtcaagctatttaataaatggcagaacatcgcttacaagtacgataaggacttagttttgatgacccattttataactaaaaacattactgataaccacggtaaaaataagactacagttcacggttatttctcctctatcttccatggtggagttgactctctggtcgacctaatgaacaagtccttcccagaattgggtattaagaagactgattgcaaagaattttcatggatcgataccaccattttctactctggcgtggttaactttaatacggctaactttaagaaggaaatattgttagaccgttcggccggtaagaaaaccgctttttctataaagttggattatgttaagaaacctattcctgaaacagccatggtcaagatcttagaaaaattgtacgaagaggatgtaggagctggtatgtacgttctttacccatatggtggtattatggaagaaatatctgagtctgccattccattcccacatagggcaggcattatgtacgaattgtggtatactgctagctgggaaaagcaagaagacaatgaaaaacacataaattgggttagaagtgtatacaatttcatgaccccctacgtcagccaaaacccaagattggcctatctaaactaccgtgacctggacctaggtaaaactaaccacgcttcaccaaacaactacacccaagctagaatctggggagagaagtatttcggtaagaatttcaacagattggtcaaagtgaagaccaaggtcgatccaaataattttttcagaaacgagcaatctattcccccattaccaccacatcatcac

SEQ ID NO: 278 - DNA, 1551 bp, Artificial Sequence
  Synthetic
aatccaagagagaactttttaaagtgcttctctaaacacatccctaataacgtcgccaatcccaaattggtgtacacccagcatgaccaactttatatgagtctgctaaacagcacgatacaaaatttacgctttatttcagatactacaccaaagccgttggtaattgttacaccttccaacaattcccatattcaggctactatcctctgtagtaaaaaagttggcttgcaaatacgtacgagatcgggtggacacgatgcagaagggatgtcttatatctcacaagtacccttcgttgtggttgatttacgaaatatgcattcgattaagatagacgtacattctcaaactgcgtgggtggaagctggtgcaacattgggagaagtttactattggattaacgagaaaaatgaaaatctatcctttccaggtggctactgtcctaccgtcggagtcggtggtcacttttcaggtgggggctatggggcactgatgaggaactatggtcttgccgctgataatatcattgacgctcatttagtgaacgttgatggcaaggttctcgataggaaaagtatgggggaggacctattctgggccataagaggaggtggtggtgaaaattttggcatcattgcagcatggaagattaaacttgtcgctgtaccatctaagagcacaatattctctgttaaaaagaacatggaaatccacggattagtcaaattgtttaataagtggcagaatattgcctacaaatacgataaagacttggtgttaatgactcatttcataaccaaaaacattacagataaccatggtaagaataaaaccactgtacacggctatttttcaagtatttttcatggaggcgtagattctctggttgatttgatgaacaagtcctttccggaactaggtattaaaaaaacggattgcaaggagttctcgtggattgatactacaatattctattcaggagtggtgaattttaatacggcgaactttaaaaaggaaatcctacttgaccggtcggctggcaaaaaaaccgcgttctctatcaagttagactacgtaaaaaagccaataccggaaactgcaatggttaaaatattggagaagctatatgaagaagatgtaggtgctggtatgtacgttctttatccatacggaggtatcatggaagagattagcgaaagtgctataccctttcctcatagagcaggcatcatgtatgaattatggtatactgcctcctgggagaaacaagaggataatgaaaaacatattaattgggttaggtctgtatacaatttcactaccccttatgtttcacagaatccaagactcgcatatctcaactatagggatttagatcttggtaagactaatcatgccagccctaacaactatacacaagcgcgtatatggggcgaaaaatacttcggaaagaattttaatcggttggtcaaggttaaaaccaaagtcgaccctaataacttttttagaaatgaacaatcaattccaccactacctttacatcaccat

SEQ ID NO: 279 - DNA, 1551 bp, Artificial Sequence
  Synthetic
aacccacgtgagaactttttgaaatgtttctctaagcatatccctaacaatgtggctaacccaaagttagtttacacacagcacgatcaactatatatgagcattttgaactccactatccaaaatctgaggttcattagtgacaccacgcccaaaccattggttattgtaaccccttctaataactctcatatccaagctactatattatgttccaagaaggtcggcttgcaaattagaactagatcaggaggtcacgatgctgaaggtatgtcatacatttcccaagttccattcgttgttgtagacctaagaaatatgcactctatcaaaattgatgtccattctcaaacagcctgggtcgaagctggtgctaccttgggtgaagtttattactggattaacgaaaagaatgaaaacttgtcgttcccaggtggttactgtccaaccgtgggtgttggtggacactttagcggtggtggatacggcgccttgatgagaaactatggtttagctgctgacaatatcatcgatgcacaccttgtcaacgttgatggtaaggtattggacagaaaatcaatgggtgaagacttgttctgggctataagaggtggcggtggtgagaactttggtatcatcgctgcatggaagattaagttagttgccgtcccatctaagtccactatcttcagtgttaaaaagaacatggaaattcatggtttggtcaagctatttaataaatggcagaacatcgcttacaagtacgataaggacttagttttgatgacccattttataactaaaaacattactgataaccacggtaaaaataagactacagttcacggttatttctcctctatcttccatggtggagttgactctctggtcgacctaatgcagaagtccttcccagaattgggtattaagaagactgattgcaaagaattttcatggatcgataccaccattttctactctggcgtggttaactttaatacggctaactttaagaaggaaatattgttagaccgttcggccggtaagaaaaccgctttttctataaagttggattatgttaagaaacctattcctgaaacagccatggtcaagatcttagaaaaattgtacgaagaggatgtaggagctggtatgtacgttctttacccatatggtggtattatggaagaaatatctgagtctgccattccattcccacatagggcaggcattatgtacgaattgtggtatactgctagctgggaaaagcaagaagacaatgaaaaacacataaattgggttagaagtgtatacaatttcactaccccctacgtcagccaaaacccaagattggcctatctaaactaccgtgacctggacctaggtaaaactaaccacgcttcaccaaacaactacacccaagctagaatctggggagagaagtatttcggtaagaatttcaacagattggtcaaagtgaagaccaaggtcgatccaaataattttttcagaaacgagcaatctattcccccattaccaccacatcatcac

SEQ ID NO: 280 - DNA, 1551 bp, Artificial Sequence
  Synthetic
aacccacgtgagaactttttgaaatgtttctctaagcatatccctaacaatgtggctaacccaaagttagtttacacacagcacgatcaactatatatgagcattttgaactccactatccaaaatctgaggttcattagtgacaccacgcccaaaccattggttattgtaaccccttctaataactctcatatccaagctactatattatgttccaagaaggtcggcttgcaaattagaactagatcaggaggtcacgatgctgaaggtatgtcatacatttcccaagttccattcgttgttgtagacctaagaaatatgcactctatcaaaattgatgtccattctcaaacagcctgggtcgaagctggtgctaccttgggtgaagtttattactggattaacgaaaagaatgaaaacttgtcgttcccaggtggttactgtccaaccgtgggtgttggtggacactttagcggtggtggatacggcgccttgatgagaaactatggtttagctgctgacaatatcatcgatgcacaccttgtcaacgttgatggtaaggtattggacagaaaatcaatgggtgaagacttgttctgggctataagaggtggcggtggtgagaactttggtatcatcgctgcatggaagattaagttagttgccgtcccatctaagtccactatcttcagtgttaaaaagaacatggaaattcatggtttggtcaagctatttaataaatggcagaacatcgcttacaagtacgataaggacttagttttgatgacccattttataactaaaaacattactgataaccacggtaaaaataagactacagttcacggttatttctcctctatcttccatggtggagttgactctctggtcgacctaatgaacaagtccttcccagaattgggtattaagaagactgattgcaaagaattttcatggatcgataccaccattttctactctggcgtggttaactttaatacggctaactttaagaaggaaatattgttagaccgttcggccggtaagaaaaccgctttttctataaagttggattatgttaagaaacctattcctgaaacagccatggtcaagatcttagaaaaattgtacgaagaggatgtaggagctggtatgtacgttctttacccatatggtggtattatggaagaaatatctgagtctgccattccattcccacatagggcaggcattatgtacgaattgtggtatactgctagctgggaaaagcaagaagacaatgaaaaacacataaattgggttagaagtgtatacaatttcactaccccctacgtcagccaaaacccaagattggcctatctaaactaccgtgacctggacctaggtaaaactaaccacgcttcaccaaaccagtacacccaagctagaatctggggagagaagtatttcggtaagaatttcaacagattggtcaaagtgaagaccaaggtcgatccaaataattttttcagaaacgagcaatctattcccccattaccaccacatcatcac

SEQ ID NO: 281 - DNA, 1551 bp, Artificial Sequence
  Synthetic
aacccacgtgagaactttttgaaatgtttctctaagcatatccctaacaatgtggctaacccaaagttagtttacacacagcacgatcaactatatagcagcattttgaactccactatccaaaatctgaggttcattagtgacaccacgcccaaaccattggttattgtaaccccttctaataactctcatatccaagctactatattatgttccaagaaggtcggcttgcaaattagaactagatcaggaggtcacgatgctgaaggtatgtcatacatttcccaagttccattcgttgttgtagacctaagaaatatgcactctatcaaaattgatgtccattctcaaacagcctgggtcgaagctggtgctaccttgggtgaagtttattactggattaacgaaaagaatgaaaacttgtcgttcccaggtggttactgtccaaccgtgggtgttggtggacactttagcggtggtggatacggcgccttgatgagaaactatggtttagctgctgacaatatcatcgatgcacaccttgtcaacgttgatggtaaggtattggacagaaaatcaatgggtgaagacttgttctgggctataagaggtggcggtggtgagaactttggtatcatcgctgcatggaagattaagttagttgccgtcccatctaagtccactatcttcagtgttaaaaagaacatggaaattcatggtttggtcaagctatttaataaatggcagaacatcgcttacaagtacgataaggacttagttttgatgacccattttataactaaaaacattactgataaccacggtaaaaataagactacagttcacggttatttctcctctatcttccatggtggagttgactctctggtcgacctaatgaacaagtccttcccagaattgggtattaagaagactgattgcaaagaattttcatggatcgataccaccattttctactctggcgtggttaactttaatacggctaactttaagaaggaaatattgttagaccgttcggccggtaagaaaaccgctttttctataaagttggattatgttaagaaacctattcctgaaacagccatggtcaagatcttagaaaaattgtacgaagaggatgtaggagctggtatgtacgttctttacccatatggtggtattatggaagaaatatctgagtctgccattccattcccacatagggcaggcattatgtacgaattgtggtatactgctagctgggaaaagcaagaagacaatgaaaaacacataaattgggttagaagtgtatacaatttcactaccccctacgtcagccaaaacccaagattggcctatctaaactaccgtgacctggacctaggtaaaactaaccacgcttcaccaaacaactacacccaagctagaatctggggagagaagtatttcggtaagaatttcaacagattggtcaaagtgaagaccaaggtcgatccaaataattttttcagaaacgagcaatctattcccccattaccaccacatcatcac

SEQ ID NO: 282 - DNA, 1551 bp, Artificial Sequence
  Synthetic
aacccacgtgagaactttttgaaatgtttctctaagcatatccctaacaatgtggctaacccaaagttagtttacacacagcacgatcaactatatatgagcattttgaactccactatccaaaatctgaggttcattagtgacaccacgcccaaaccattggttattgtaaccccttctaatgaatctcatatccaagctactatattatgttccaagaaggtcggcttgcaaattagaactagatcaggaggtcacgatgctgaaggtatgtcatacatttcccaagttccattcgttgttgtagacctaagaaatatgcactctatcaaaattgatgtccattctcaaacagcctgggtcgaagctggtgctaccttgggtgaagtttattactggattaacgaaaagaatgaaaacttgtcgttcccaggtggttactgtccaaccgtgggtgttggtggacactttagcggtggtggatacggcgccttgatgagaaactatggtttagctgctgacaatatcatcgatgcacaccttgtcaacgttgatggtaaggtattggacagaaaatcaatgggtgaagacttgttctgggctataagaggtggcggtggtgagaactttggtatcatcgctgcatggaagattaagttagttgccgtcccatctaagtccactatcttcagtgttaaaaagaacatggaaattcatggtttggtcaagctatttaataaatggcagaacatcgcttacaagtacgataaggacttagttttgatgacccattttataactaaaaacattactgataaccacggtaaaaataagactacagttcacggttatttctcctctatcttccatggtggagttgactctctggtcgacctaatgaacaagtccttcccagaattgggtattaagaagactgattgcaaagaattttcatggatcgataccaccattttctactctggcgtggttaactttaatacggctaactttaagaaggaaatattgttagaccgttcggccggtaagaaaaccgctttttctataaagttggattatgttaagaaacctattcctgaaacagccatggtcaagatcttagaaaaattgtacgaagaggatgtaggagctggtatgtacgttctttacccatatggtggtattatggaagaaatatctgagtctgccattccattcccacatagggcaggcattatgtacgaattgtggtatactgctagctgggaaaagcaagaagacaatgaaaaacacataaattgggttagaagtgtatacaatttcactaccccctacgtcagccaaaacccaagattggcctatctaaactaccgtgacctggacctaggtaaaactaaccacgcttcaccaaacaactacacccaagctagaatctggggagagaagtatttcggtaagaatttcaacagattggtcaaagtgaagaccaaggtcgatccaaataattttttcagaaacgagcaatctattcccccattaccaccacatcatcac

SEQ ID NO: 283 - DNA, 1551 bp, Artificial Sequence
  Synthetic
aacccacgtgagaactttttgaaatgtttctctaagcatatccctaacaatgtggctaacccaaagttagtttacacacagcacgatcaactatatatgagcattttgaactccactatccaaaatctgaggttcattagtgacaccacgcccaaaccattggttattgtaaccccttctaataactctcatatccaagctactatattatgttccaagaaggtcggcttgcaaattagaactagatcaggaggtcacgatgctgaaggtatgtcatacatttcccaagttccattcgttgttgtagacctaagaaatatgcgctctatcaaaattgatgtccattctcaaacagcctgggtcgaagctggtgctaccttgggtgaagtttattactggattaacgaaaagaatgaaaacttgtcgttcccaggtggttactgtccaaccgtgggtgttggtggacactttagcggtggtggatacggcgccttgatgagaaactatggtttagctgctgacaatatcatcgatgcacaccttgtcaacgttgatggtaaggtattggacagaaaatcaatgggtgaagacttgttctgggctataagaggtggcggtggtgagaactttggtatcatcgctgcatggaagattaagttagttgccgtcccatctaagtccactatcttcagtgttaaaaagaacatggaaattcatggtttggtcaagctatttaataaatggcagaacatcgcttacaagtacgataaggacttagttttgatgacccattttataactaaaaacattactgataaccacggtaaaaataagactacagttcacggttatttctcctctatcttccatggtggagttgactctctggtcgacctaatgaacaagtccttcccagaattgggtattaagaagactgattgcaaagaattttcatggatcgataccaccattttctactctggcgtggttaactttaatacggctaactttaagaaggaaatattgttagaccgttcggccggtaagaaaaccgctttttctataaagttggattatgttaagaaacctattcctgaaacagccatggtcaagatcttagaaaaattgtacgaagaggatgtaggagctggtatgtacgttctttacccatatggtggtattatggaagaaatatctgagtctgccattccattcccacatagggcaggcattatgtacgaattgtggtatactgctagctgggaaaagcaagaagacaatgaaaaacacataaattgggttagaagtgtatacaatttcactaccccctacgtcagccaaaacccaagattggcctatctaaactaccgtgacctggacctaggtaaaactaaccacgcttcaccaaacaactacacccaagctagaatctggggagagaagtatttcggtaagaatttcaacagattggtcaaagtgaagaccaaggtcgatccaaataattttttcagaaacgagcaatctattcccccattaccaccacatcatcac

SEQ ID NO: 284 - protein, 517 aa, Artificial Sequence; identical to SEQ ID NO: 141
  Synthetic

SEQ ID NO: 285 - protein, 517 aa, Artificial Sequence
  Synthetic
NPRENFLKCFSKHIPNNVANPKLVYTQHDQLYMSILNSTIQNLRFISDTTPKPLVIVTPSNNSHIQATILCSKKVGLQIRTRSGGHDAEGMSYISQVPFVVVDLRNMHSIKIDVHSQTAWVEAGATLGEVYYWINEKNENLSFPGGYCPTVGVGGHFSGGGYGALMRNYGLAADNIIDAHLVNVDGKVLDRKSMGEDLFWAIRGGGGENFGIIAAWKIKLVAVPSKSTIFSVKKNMEIHGLVKLFNKWQNIAYKYDKDLMLMTHFITKNITDNHGKNKTTVHGYFSSIFHGGVDSLVDLMNKSFPELGIKKTDCKEFSWIDTTIFYSGVVNFNTANFKKEILLDRSAGKKTAFSIKLDYVKKPIPETAMVKILEKLYEEDVGAGMYVLYPYGGIMEEISESAIPFPHRAGIMYELWYTASWEKQEDNEKHINWVRSVYNFTTPYVSQNPRLAYLNYRDLDLGKTNHASPNNYTQARIWGEKYFGKNFNRLVKVKTKVDPNNFFRNEQSIPPLPPHHH

SEQ ID NO: 286 - protein, 517 aa, Artificial Sequence; identical to SEQ ID NO: 203
  Synthetic

SEQ ID NO: 287 - protein, 518 aa, Artificial Sequence; identical to SEQ ID NO: 200
  Synthetic

SEQ ID NO: 288 - protein, 518 aa, Artificial Sequence
  Synthetic
ANPQENFLKCFSQYIPTNVTNAKLVYTQHDQFYMSILNSTIQNLRFTSDTTPKPLVIITPLNVSHIQGTILCSKKVGLQIRTRSGGHDAEGMSYISQVPFVVVDLRNMHSIKIDVHSQTAWVEAGATLGEVYYWINEKNENLSFPGGYCPTVGVGGHFSGGGYGALMRNYGLAADNIIDAHLVNVDGKVLDRKSMGEDLFWAIRGGGGENFGIIAAWKIKLVAVPSKSTIFSVKKNMEIHGLVKLFNKWQNIAYKYDKDLVLMTHFITKNITDNHGKNKTTVHGYFSSIFHGGVDSLVDLMNKSFPELGIKKTDCKEFSWIDTTIFYSGVVNFNTANFKKEILLDRSAGKKTAFSIKLDYVKKPIPETAMVKILEKLYEEDVGAGMYVLYPYGGIMEEISESAIPFPHRAGIMYELWYTASWEKQEDNEKHINWVRSVYNFTTPYVSQNPRLAYLNYRDLDLGKTNHASPNNYTQARIWGEKYFGKNFNRLVKVKTKVDPNNFFRNEQSIPPLPLRHH

SEQ ID NO: 289 - protein, 517 aa, Artificial Sequence
  Synthetic
NPRENFLKCFSKHIPNNVANPKLVYTQHDQLYMSLLNSTIQNLRFISDTTPKPLVIVTPSNNSHIQATILCSKKVGLQIRTRSGGHDAEGMSYISQVPFVVVDLRNMHSIKIDVHSQTAWVEAGATLGEVYYWINEKNENLSFPGGYCPTVGVGGHFSGGGYGALMRNYGLAADNIIDAHLVNVDGKVLDRKSMGEDLFWAIRGGGGENFGIIAAWKIKLVAVPSKSTIFSVKKNMEIHGLVKLFNKWQNIAYKYDKDLVLMTHFITKNITDNHGKNKTTVHGYFSSIFHGGVDSLVDLMNKSFPELGIKKTDCKEFSWIDTTIFYSGVVNFNTANFKKEILLDRSAGKKTAFSIKLDYVKKPIPETAMVKILEKLYEEDVGAGMYVLYPYGGIMEEISESAIPFPHRAGIMYELWYTASWEKQEDNEKHINWVRSVYNFTTPYVSQNPRLAYLNYRDLDLGKTNHASPNNYTQARIWGEKYFGKNFNRLVKVKTKVDPNNFFRNEQSIPPLPLHHH

SEQ ID NO: 290 - protein, 517 aa, Artificial Sequence
  Synthetic
NPRENFLKCFSKHIPNNVANPKLVYTQHDQLYMSILNSTIQNLRFISDTTPKPLVIVTPSENSHIQATILCSKKVGLQIRTRSGGHDAEGMSYISQVPFVVVDLRNMHSIKIDVHSQTAWVEAGATLGEVYYWINEKNENLSFPGGYCPTVGVGGHFSGGGYGALMRNYGLAADNIIDAHLVNVDGKVLDRKSMGEDLFWAIRGGGGENFGIIAAWKIKLVAVPSKSTIFSVKKNMEIHGLVKLFNKWQNIAYKYDKDLVLMTHFITKNITDNHGKNKTTVHGYFSSIFHGGVDSLVDLMNKSFPELGIKKTDCKEFSWIDTTIFYSGVVNFNTANFKKEILLDRSAGKKTAFSIKLDYVKKPIPETAMVKILEKLYEEDVGAGMYVLYPYGGIMEEISESAIPFPHRAGIMYELWYTASWEKQEDNEKHINWVRSVYNFTTPYVSQNPRLAYLNYRDLDLGKTNHASPNNYTQARIWGEKYFGKNFNRLVKVKTKVDPNNFFRNEQSIPPLPPHHH

SEQ ID NO: 291 - protein, 517 aa, Artificial Sequence
  Synthetic
NPRENFLKCFSKHIPNNVANPKLVYTQHDQLYMSILNSTIQNLRFISDTTPKPLVIVTPSHNSHIQATILCSKKVGLQIRTRSGGHDAEGMSYISQVPFVVVDLRNMHSIKIDVHSQTAWVEAGATLGEVYYWINEKNENLSFPGGYCPTVGVGGHFSGGGYGALMRNYGLAADNIIDAHLVNVDGKVLDRKSMGEDLFWAIRGGGGENFGIIAAWKIKLVAVPSKSTIFSVKKNMEIHGLVKLFNKWQNIAYKYDKDLVLMTHFITKNITDNHGKNKTTVHGYFSSIFHGGVDSLVDLMNKSFPELGIKKTDCKEFSWIDTTIFYSGVVNFNTANFKKEILLDRSAGKKTAFSIKLDYVKKPIPETAMVKILEKLYEEDVGAGMYVLYPYGGIMEEISESAIPFPHRAGIMYELWYTASWEKQEDNEKHINWVRSVYNFTTPYVSQNPRLAYLNYRDLDLGKTNHASPNNYTQARIWGEKYFGKNFNRLVKVKTKVDPNNFFRNEQSIPPLPPHHH

SEQ ID NO: 292 - protein, 517 aa, Artificial Sequence
  Synthetic
NPRENFLKCFSKHIPNNVANPKLVYTQHDQLYMSILNSTIQNLRFISDTTPKPLVIVTPSNNSHIQATILCSKKVGLQIRTRSGGHDAEGMSYISQVPFVVVDLRNMHSIKIDVHSQTAWVEAGATLGEVYYWINEKNENLSFPGGYCPTVGVGGHFSGGGYGALMRNYGLAADNIIDAHLVNVDGKVLDRKSMGEDLFWAIRGGGGENFGIIAAWKIKLVAVPSKSTIFSVKKNMEIHGLVKLFNKWQNIAYKYDKDLTLMTHFITKNITDNHGKNKTTVHGYFSSIFHGGVDSLVDLMNKSFPELGIKKTDCKEFSWIDTTIFYSGVVNFNTANFKKEILLDRSAGKKTAFSIKLDYVKKPIPETAMVKILEKLYEEDVGAGMYVLYPYGGIMEEISESAIPFPHRAGIMYELWYTASWEKQEDNEKHINWVRSVYNFTTPYVSQNPRLAYLNYRDLDLGKTNHASPNNYTQARIWGEKYFGKNFNRLVKVKTKVDPNNFFRNEQSIPPLPPHHH

SEQ ID NO: 293 - protein, 517 aa, Artificial Sequence; identical to SEQ ID NO: 155
  Synthetic

SEQ ID NO: 294 - protein, 517 aa, Artificial Sequence; identical to SEQ ID NO: 289
  Synthetic

SEQ ID NO: 295 - protein, 517 aa, Artificial Sequence; identical to SEQ ID NO: 203
  Synthetic

SEQ ID NO: 296 - protein, 517 aa, Artificial Sequence; identical to SEQ ID NO: 203
  Synthetic

SEQ ID NO: 297 - protein, 518 aa, Artificial Sequence
  Synthetic
ANPRENFLKCFSKHIPNNVANPKLVYTQHDQLYMSLLNSTIQNLRFISDTTPKPLVIVTPSNNSHIQATILCSKKVGLQIRTRSGGHDAEGMSYISQVPFVVVDLRNMHSIKIDVHSQTAWVEAGATLGEVYYWINEKNENLSFPGGYCPTVGVGGHFSGGGYGALMRNYGLAADNIIDAHLVNVDGKVLDRKSMGEDLFWAIRGGGGENFGIIAAWKIKLVAVPSKSTIFSVKKNMEIHGLVKLFNKWQNIAYKYDKDLVLMTHFITKNITDNHGKNKTTVHGYFSSIFHGGVDSLVDLMNKSFPELGIKKTDCKEFSWIDTTIFYSGVVNFNTANFKKEILLDRSAGKKTAFSIKLDYVKKPIPETAMVKILEKLYEEDVGAGMYVLYPYGGIMEEISESAIPFPHRAGIMYELWYTASWEKQEDNEKHINWVRSVYNFTTPYVSQNPRLAYLNYRDLDLGKTNHASPNNYTQARIWGEKYFGKNFNRLVKVKTKVDPNNFFRNEQSIPPLPLHHH

SEQ ID NO: 298 - protein, 518 aa, Artificial Sequence; identical to SEQ ID NO: 288
  Synthetic

SEQ ID NO: 299 - protein, 517 aa, Artificial Sequence
  Synthetic
NPQENFLKCFSEYIPNNPANPKFIYTQHDQLYMSVLQSTIQNLRFTSDTTPKPLVIVTPSNVSHIQASILCSKKVGLQIRTRSGGHDAEGMSYISQVPFVVVDLRNMHSIKIDVHSQTAWVEAGATLGEVYYWINEKNENFSFPGGYCPTVGVGGHFSGGGYGALMRNYGLAADNIIDAHLVNVDGKVLDRKSMGEDLFWAIRGGGGENFGIIAAWKIKLVAVPSKSTIFSVKKNMEIHGLVKLFNKWQNIAYKYDKDLVLMTHFITKNITDNHGKQKTTVHGYFSSIFHGGVDSLVDLMNKSFPELGIKKTDCKEFSWIDTTIFYSGVVNFNTANFKKEILLDRSAGKKTAFSIKLDYVKKPIPETAMVKILEKLYEEDVGVGMYVLYPYGGIMEEISESAIPFPHRAGIMYELWYTASWEKQEDNEKHINWVRSVYNFTTPYVSQNPRLAYLNYRDLDLGKTNPESPNNYTQARIWGEKYFGKNFNRLVKVKTKADPNNFFRNEQSIPPLPPHHH

SEQ ID NO: 300 - protein, 517 aa, Artificial Sequence
  Synthetic
NPQENFLKCFSEYIPNNPANPKFIYTQHDQLYMSVLQSTIQNLRFTSDTTPKPLVIVTPSNVSHIQASILCSKKVGLQIRTRSGGHDAEGMSYISQVPFVVVDLRNMHSIKIDVHSQTAWVEAGATLGEVYYWINEKNENFSFPGGYCPTVGVGGHFSGGGYGALMRNYGLAADNIIDAHLVNVDGKVLDRKSMGEDLFWAIRGGGGENFGIIAAWKIKLVAVPSKSTIFSVKKNMEIHGLVKLFNKWQNIAYKYDKDLVLMTHFITKNITDNHGKQKTTVHGYFSSIFHGGVDSLVDLMNKSFPELGIKKTDCKEFSWIDTTIFYSGVVNFNTANFKKEILLDRSAGKKTAFSIKLDYVKKPIPETAMVKILEKLYEEDVGVGMYVLYPYGGIMEEISESAIPFPHRAGIMYELWYTASWEKQEDNEKHINWVRSVYNFTTPYVSQNPRLAYLNYRDLDLGKTNPESPNQYTQARIWGEKYFGKNFNRLVKVKTKADPNNFFRNEQSIPPLPPHHH

SEQ ID NO: 301 - protein, 517 aa, Artificial Sequence
  Synthetic
NPQENFLKCFSEYIPNNPANPKFIYTQHDQLYMSVLQSTIQNLRFTSDTTPKPLVIVTPSNVSHIQASILCSKKVGLQIRTRSGGHDAEGMSYISQVPFVVVDLRNMHSIKIDVHSQTAWVEAGATLGEVYYWINEKNENFSFPGGYCPTVGVGGHFSGGGYGALMRNYGLAADNIIDAHLVNVDGKVLDRKSMGEDLFWAIRGGGGENFGIIAAWKIKLVAVPSKSTIFSVKKNMEIHGLVKLFNKWQNIAYKYDKDLVLMTHFITKNITDNHGKQKTTVHGYFSSIFHGGVDSLVDLMQKSFPELGIKKTDCKEFSWIDTTIFYSGVVNFNTANFKKEILLDRSAGKKTAFSIKLDYVKKPIPETAMVKILEKLYEEDVGVGMYVLYPYGGIMEEISESAIPFPHRAGIMYELWYTASWEKQEDNEKHINWVRSVYNFTTPYVSQNPRLAYLNYRDLDLGKTNPESPNNYTQARIWGEKYFGKNFNRLVKVKTKADPNNFFRNEQSIPPLPPHHH

SEQ ID NO: 302 - protein, 517 aa, Artificial Sequence
  Synthetic
NPRENFLKCFSKHIPNNVANPKLVYTQHDQLYMSILNSTIQNLRFISDTTPKPLVIVTPSNNSHIQATILCSKKVGLQIRTRSGGHDAEGMSYISQVPFVVVDLRNMHSIKIDVHSQTAWVEAGATLGEVYYWINEKNENLSFPGGYCPTVGVGGHFSGGGYGALMRNYGLAADNIIDAHLVNVDGKVLDRKSMGEDLFWAIRGGGGENFGIIAAWKIKLVAVPSKSTIFSVKKNMEIHGLVKLFNKWQNIAYKYDKDLVLMTHFITKNITDNHGKNKTTVHGYFSSIFHGGVDSLVDLMNKSFPELGIKKTDCKEFSWIDTTIFYSGVVNFNTANFKKEILLDRSAGKKTAFSIKLDYVKKPIPETAMVKILEKLYEEDVGAGMYVLYPYGGIMEEISESAIPFPHRAGIMYELWYTASWEKQEDNEKHINWVRSVYNFTTPYVSQNPRLAYLNYRDLDLGKTNDASPNNYTQARIWGEKYFGKNFNRLVKVKTKVDPNNFFRNEQSIPPLPPHHH

SEQ ID NO: 303 - protein, 517 aa, Artificial Sequence
  Synthetic
NPQENFLKCFSEYIPNNPANPKFIYTQHDQLYMSVLQSTIQNLRFTSDTTPKPLVIVTPSNVSHIQASILCSKKVGLQIRTRSGGHDAEGMSYISQVPFVVVDLRNMHSIKIDVHSQTAWVEAGATLGEVYYWINEKNEQFSFPGGYCPTVGVGGHFSGGGYGALMRNYGLAADNIIDAHLVNVDGKVLDRKSMGEDLFWAIRGGGGENFGIIAAWKIKLVAVPSKSTIFSVKKNMEIHGLVKLFNKWQNIAYKYDKDLVLMTHFITKNITDNHGKNKTTVHGYFSSIFHGGVDSLVDLMNKSFPELGIKKTDCKEFSWIDTTIFYSGVVNFNTANFKKEILLDRSAGKKTAFSIKLDYVKKPIPETAMVKILEKLYEEDVGVGMYVLYPYGGIMEEISESAIPFPHRAGIMYELWYTASWEKQEDNEKHINWVRSVYNFTTPYVSQNPRLAYLNYRDLDLGKTNPESPNNYTQARIWGEKYFGKNFNRLVKVKTKADPNNFFRNEQSIPPLPPHHH

SEQ ID NO: 304 - protein, 517 aa, Artificial Sequence
  Synthetic
NPRENFLKCFSKHIPNNVANPKLVYTQHDQLYMSILNSTIQNLRFISDTTPKPLVIVTPSNNSHIQATILCSKKVGLQIRTRSGGHDAEGMSYISQVPFVVVDLRNMHSIKIDVHSQTAWVEAGATLGEVYYWINEKNENLSFPGGYCPTVGVGGHFSGGGYGALMRNYGLAADNIIDAHLVNVDGKVLDRKSMGEDLFWAIRGGGGENFGIIAAWKIKLVAVPSKSTIFSVKKNMEIHGLVKLFNKWQNIAYKYDKDLVLMTHFITKNITDNHGKNKTTVHGYFSSIFHGGVDSLVDLMNKSFPELGIKKTDCKEFSWIDTTIFYSGVVNFNTANFKKEILLDRSAGKKTAFSIKLDYVKKPIPETAMVKILEKLYEEDVGAGMYVLYPYGGIMEEISESAIPFPHRAGIMYELWYTASWEKQEDNEKHINWVRSVYNFTTPYVSQNPRLAYLNYRDLDLGKTNEASPNNYTQARIWGEKYFGKNFNRLVKVKTKVDPNNFFRNEQSIPPLPPHHH

SEQ ID NO: 305 - protein, 517 aa, Artificial Sequence; identical to SEQ ID NO: 289
  Synthetic

SEQ ID NO: 306 - protein, 517 aa, Artificial Sequence; identical to SEQ ID NO: 141
  Synthetic

SEQ ID NO: 307 - protein, 517 aa, Artificial Sequence
  Synthetic
NPRENFLKCFSKHIPNNVANPKLVYTQHDQLYMSILNSTIQNLRFISDTTPKPLVIVTPSNNSHIQATILCSKKVGLQIRTRSGGHDAEGMSYISQVPFVVVDLRNMHSIKIDVHSQTAWVEAGATLGEVYYWINEKNENLSFPGGYCPTVGVGGHFSGGGYGALMRNYGLAADNIIDAHLVNVDGKVLDRKSMGEDLFWAIRGGGGENFGIIAAWKIKLVAVPSKSTIFSVKKNMEIHGLVKLFNKWQNIAYKYDKDLVLMTHFITKNITDNHGKNKTTVHGYFSSIFHGGVDSLVDLMNKSFPELGIKKTDCKEFSWIDTTIFYSGVVNFNTANFKKEILLDRSAGKKTAFSIKLDYVKKPIPETAMVKILEKLYEEDVGAGMYVLYPYGGIMEEISESAIPFPHRAGIMYELWYTASWEKQEDNEKHINWVRSVYNFMTPYVSQNPRLAYLNYRDLDLGKTNHASPNNYTQARIWGEKYFGKNFNRLVKVKTKVDPNNFFRNEQSIPPLPPHHH

SEQ ID NO: 308 - protein, 517 aa, Artificial Sequence; identical to SEQ ID NO: 289
  Synthetic

SEQ ID NO: 309 - protein, 517 aa, Artificial Sequence
  Synthetic
NPRENFLKCFSKHIPNNVANPKLVYTQHDQLYMSILNSTIQNLRFISDTTPKPLVIVTPSNNSHIQATILCSKKVGLQIRTRSGGHDAEGMSYISQVPFVVVDLRNMHSIKIDVHSQTAWVEAGATLGEVYYWINEKNENLSFPGGYCPTVGVGGHFSGGGYGALMRNYGLAADNIIDAHLVNVDGKVLDRKSMGEDLFWAIRGGGGENFGIIAAWKIKLVAVPSKSTIFSVKKNMEIHGLVKLFNKWQNIAYKYDKDLVLMTHFITKNITDNHGKNKTTVHGYFSSIFHGGVDSLVDLMQKSFPELGIKKTDCKEFSWIDTTIFYSGVVNFNTANFKKEILLDRSAGKKTAFSIKLDYVKKPIPETAMVKILEKLYEEDVGAGMYVLYPYGGIMEEISESAIPFPHRAGIMYELWYTASWEKQEDNEKHINWVRSVYNFTTPYVSQNPRLAYLNYRDLDLGKTNHASPNNYTQARIWGEKYFGKNFNRLVKVKTKVDPNNFFRNEQSIPPLPPHHH

SEQ ID NO: 310 - protein, 517 aa, Artificial Sequence
  Synthetic
NPRENFLKCFSKHIPNNVANPKLVYTQHDQLYMSILNSTIQNLRFISDTTPKPLVIVTPSNNSHIQATILCSKKVGLQIRTRSGGHDAEGMSYISQVPFVVVDLRNMHSIKIDVHSQTAWVEAGATLGEVYYWINEKNENLSFPGGYCPTVGVGGHFSGGGYGALMRNYGLAADNIIDAHLVNVDGKVLDRKSMGEDLFWAIRGGGGENFGIIAAWKIKLVAVPSKSTIFSVKKNMEIHGLVKLFNKWQNIAYKYDKDLVLMTHFITKNITDNHGKNKTTVHGYFSSIFHGGVDSLVDLMNKSFPELGIKKTDCKEFSWIDTTIFYSGVVNFNTANFKKEILLDRSAGKKTAFSIKLDYVKKPIPETAMVKILEKLYEEDVGAGMYVLYPYGGIMEEISESAIPFPHRAGIMYELWYTASWEKQEDNEKHINWVRSVYNFTTPYVSQNPRLAYLNYRDLDLGKTNHASPNQYTQARIWGEKYFGKNFNRLVKVKTKVDPNNFFRNEQSIPPLPPHHH

SEQ ID NO: 311 - protein, 517 aa, Artificial Sequence
  Synthetic
NPRENFLKCFSKHIPNNVANPKLVYTQHDQLYSSILNSTIQNLRFISDTTPKPLVIVTPSNNSHIQATILCSKKVGLQIRTRSGGHDAEGMSYISQVPFVVVDLRNMHSIKIDVHSQTAWVEAGATLGEVYYWINEKNENLSFPGGYCPTVGVGGHFSGGGYGALMRNYGLAADNIIDAHLVNVDGKVLDRKSMGEDLFWAIRGGGGENFGIIAAWKIKLVAVPSKSTIFSVKKNMEIHGLVKLFNKWQNIAYKYDKDLVLMTHFITKNITDNHGKNKTTVHGYFSSIFHGGVDSLVDLMNKSFPELGIKKTDCKEFSWIDTTIFYSGVVNFNTANFKKEILLDRSAGKKTAFSIKLDYVKKPIPETAMVKILEKLYEEDVGAGMYVLYPYGGIMEEISESAIPFPHRAGIMYELWYTASWEKQEDNEKHINWVRSVYNFTTPYVSQNPRLAYLNYRDLDLGKTNHASPNNYTQARIWGEKYFGKNFNRLVKVKTKVDPNNFFRNEQSIPPLPPHHH

SEQ ID NO: 312 - protein, 517 aa, Artificial Sequence
  Synthetic
NPRENFLKCFSKHIPNNVANPKLVYTQHDQLYMSILNSTIQNLRFISDTTPKPLVIVTPSNESHIQATILCSKKVGLQIRTRSGGHDAEGMSYISQVPFVVVDLRNMHSIKIDVHSQTAWVEAGATLGEVYYWINEKNENLSFPGGYCPTVGVGGHFSGGGYGALMRNYGLAADNIIDAHLVNVDGKVLDRKSMGEDLFWAIRGGGGENFGIIAAWKIKLVAVPSKSTIFSVKKNMEIHGLVKLFNKWQNIAYKYDKDLVLMTHFITKNITDNHGKNKTTVHGYFSSIFHGGVDSLVDLMNKSFPELGIKKTDCKEFSWIDTTIFYSGVVNFNTANFKKEILLDRSAGKKTAFSIKLDYVKKPIPETAMVKILEKLYEEDVGAGMYVLYPYGGIMEEISESAIPFPHRAGIMYELWYTASWEKQEDNEKHINWVRSVYNFTTPYVSQNPRLAYLNYRDLDLGKTNHASPNNYTQARIWGEKYFGKNFNRLVKVKTKVDPNNFFRNEQSIPPLPPHHH

SEQ ID NO: 313 - protein, 517 aa, Artificial Sequence
  Synthetic
NPRENFLKCFSKHIPNNVANPKLVYTQHDQLYMSILNSTIQNLRFISDTTPKPLVIVTPSNNSHIQATILCSKKVGLQIRTRSGGHDAEGMSYISQVPFVVVDLRNMRSIKIDVHSQTAWVEAGATLGEVYYWINEKNENLSFPGGYCPTVGVGGHFSGGGYGALMRNYGLAADNIIDAHLVNVDGKVLDRKSMGEDLFWAIRGGGGENFGIIAAWKIKLVAVPSKSTIFSVKKNMEIHGLVKLFNKWQNIAYKYDKDLVLMTHFITKNITDNHGKNKTTVHGYFSSIFHGGVDSLVDLMNKSFPELGIKKTDCKEFSWIDTTIFYSGVVNFNTANFKKEILLDRSAGKKTAFSIKLDYVKKPIPETAMVKILEKLYEEDVGAGMYVLYPYGGIMEEISESAIPFPHRAGIMYELWYTASWEKQEDNEKHINWVRSVYNFTTPYVSQNPRLAYLNYRDLDLGKTNHASPNNYTQARIWGEKYFGKNFNRLVKVKTKVDPNNFFRNEQSIPPLPPHHH

SEQ ID NO: 314 - DNA, 81 bp, Artificial Sequence
  Synthetic
aagtgctcaacattctccttttggtttgtttgcaagataatatttttctttttctcattcaatatccaaacttccattgct

SEQ ID NO: 315 - protein, 27 aa, Cannabis sativa
KCSTFSFWFVCKIIFFFFSFNIQTSIA

SEQ ID NO: 316 - DNA, 83 bp, Artificial Sequence
  Synthetic
aattgctcagcattttccttctggttcgtctgtaagattatctttttctttctttctttccacatacaaatctcgattgccaa

SEQ ID NO: 317 - protein, 27 aa, Cannabis sativa
NCSAFSFWFVCKIIFFFLSFHIQISIA

SEQ ID NO: 318 - DNA, 81 bp, Artificial Sequence
  Synthetic
aattgctcaacattctccttttggtttgtttgcaaaataatatttttctttctctcattcaatatccaaatttcaatagct

SEQ ID NO: 319 - protein, 27 aa, Cannabis sativa
NCSTFSFWFVCKIIFFFLSFNIQISIA

SEQ ID NO: 320 - protein, 545 aa, Cannabis sativa
MNCSAFSFWFVCKIIFFFLSFHIQISIANPRENFLKCFSKHIPNNVANPKLVYTQHDQLYMSILNSTIQNLRFISDTTPKPLVIVTPSNNSHIQATILCSKKVGLQIRTRSGGHDAEGMSYISQVPFVVVDLRNMHSIKIDVHSQTAWVEAGATLGEVYYWINEKNENLSFPGGYCPTVGVGGHFSGGGYGALMRNYGLAADNIIDAHLVNVDGKVLDRKSMGEDLFWAIRGGGGENFGIIAAWKIKLVAVPSKSTIFSVKKNMEIHGLVKLFNKWQNIAYKYDKDLVLMTHFITKNITDNHGKNKTTVHGYFSSIFHGGVDSLVDLMNKSFRELGIKKTDCKELSWIDTTIFYSGVVNYNTANFKKEILLDRSAGKKTAFSIKLDYVKKPIPETAMVKILEKLYEEDVGAGMYVLYPYGGIMEEISESAIPFPHRAGIMYELWYTASWEKQEDNEKHINWVRSVYNFTTPYVSQNPRLAYLNYRDLDLGKTNHASPNNYTQARIWGEKYFGKNFNRLVKVKTKVDPNNFFRNEQSIPPLPPHHH

SEQ ID NO: 321 - protein, 517 aa, Cannabis sativa
NPRENFLKCFSKHIPNNVANPKLVYTQHDQLYMSILNSTIQNLRFISDTTPKPLVIVTPSNNSHIQATILCSKKVGLQIRTRSGGHDAEGMSYISQVPFVVVDLRNMHSIKIDVHSQTAWVEAGATLGEVYYWINEKNENLSFPGGYCPTVGVGGHFSGGGYGALMRNYGLAADNIIDAHLVNVDGKVLDRKSMGEDLFWAIRGGGGENFGIIAAWKIKLVAVPSKSTIFSVKKNMEIHGLVKLFNKWQNIAYKYDKDLVLMTHFITKNITDNHGKNKTTVHGYFSSIFHGGVDSLVDLMNKSFRELGIKKTDCKELSWIDTTIFYSGVVNYNTANFKKEILLDRSAGKKTAFSIKLDYVKKPIPETAMVKILEKLYEEDVGAGMYVLYPYGGIMEEISESAIPFPHRAGIMYELWYTASWEKQEDNEKHINWVRSVYNFTTPYVSQNPRLAYLNYRDLDLGKTNHASPNNYTQARIWGEKYFGKNFNRLVKVKTKVDPNNFFRNEQSIPPLPPHHH

SEQ ID NO: 322 - DNA, 1548 bp, Artificial Sequence
  Synthetic
aatccaagagaaaactttttgaagtgtttctcccagtacatcccaaacaatgctactaatcttaagttggtgtacactcaaaataacccattgtacatgtctgtcttgaattccaccattcacaacttgagattcacctcagacacaactccaaagcctcttgtcatcgtcaccccatctcatgtctctcacatccagggtactattctatgctccaaaaaggtcggattgcaaattcgtacaagatccggtggtcatgactctgaaggaatgagctacatttcccaagttcccttcgttatcgttgatttaagaaacatgagatctattaaaatcgatgttcactctcaaaccgcctgggttgaagctggtgccaccttaggtgaggtttactattgggttaacgaaaagaacgaaaatttgtccttagctgccggttactgtccaacggtctgtgctggtggtcactttggcggtggtggttatggtccattgatgagaaactacggtttggcagctgataacataatcgatgctcatctggttaatgtccatggtaaggtgcttgatagaaaaagcatgggtgaagatttgttctgggccttaagaggaggtggtgctgaatcctttggtattatcgtggcttggaagatcagattggttgccgttccaaagtcaactatgttttctgtcaaaaagatcatggaaattcatgaacttgtcaagttggttaataaatggcaaaatattgcctacaaatatgacaaagatctattgcttatgactcattttatcacccgtaatatcactgataaccaaggtaagaacaaaacagccatccacacctatttctcttcagttttcttgggcggtgttgattcgcttgttgacctaatgaacaaatcttttccagaattaggtatcaaaaagaccgactgccgtcaactgtcctggatcgatacgattatcttctactccggcgttgttaattatgacacagacaacttcaacaaagaaatcttgttggacaggtcagctggtcaaaacggtgctttcaagatcaagttggactacgtcaagaagccaattccagaatccgtgttcgtgcaaatcttagaaaagctttacgaagaagatattggtgctggtatgtatgtcttgtacccttacggtggcattatggatgaaatttcggaatccgccattccattcccccaccgtgccggtatcttatatgaattgtggtacatttgttcttgggaaaagcaagaggacaacgaaaagcacttgaattggatccgtaatatatacaactttatgaccccctatgtctctaagaacccaagattggcctatcttaattatagagatttagatatcggtatcaatgacccaaagaatccaaacaactacacgcaagctagaatctggggtgaaaagtatttcggtaagaatttcgatagattagtgaaggtcaagactttagtcgatccaaataacttcttcagaaatgaacaatctatcccacctttgccaagacatagacac

SEQ ID NO: 323 - DNA, 1548 bp, Artificial Sequence
  Synthetic
aacccacgtgaaaatttcttaaagtgtttttctcagtatataccaaataatgctactaacttgaagttggtctacactcaaaacaatccactgtacatgagcgttttgaattccactattcataatttgagatttacaagtgatactaccccaaagccattagtcatcgttaccccaagccatgtttcacacattcaaggtactatattgtgcagtaaaaaggtcggtttgcaaatcagaactcgttccggtggtcacgactccgaaggtatgagttacatttcccaagttccctttgttattgtcgacctgagaaacatgagatccattaagattgatgtccattcgcaaacagcttgggtcgaagccggtgctactttaggtgaagtatactactgggttaatgaaaagaacgaaaacttgtctttagctgctggatactgtcctacagtttgtgctggtggtcactttggtggtggtggatacggtcctctaatgagaaactacggtctagctgccgacaacattattgacgcccacttagttaatgttcatggaaaggttttagatagaaaatccatgggtgaagatttgttctgggctttgagaggaggaggtgctgaatcctttggtatcatagttgcatggaagatcagacttgtagctgttcccaagtctactatgttttctgtcaagaagataatggagattcacgaattagttaagttggtaaataaatggcaaaacatcgcctacaagtatgacaaggatttactgcttatgacgcacttcattacccgtaatattaccgataaccaaggtaagaacaagacagccatccacacatacttttcttctgtatttttaggcggtgtagattccttagtcgatttgatgaacaaatccttcccagaattgggtattaaaaaaactgactgtagacaattgtcctggatcgacactatcattttctactctggtgttgtcaattatgacaccgacaatttcaacaaggaaatcttgttagatagatccgctggccaaaacggtgctttcaaaattaaattggactacgtaaagaagcctattccagaatccgtctttgtgcaaattctagagaagttgtatgaagaagatattggtgccggtatgtatgtcttatacccatatggtggtataatggatgaaatcagcgaatctgccataccattcccacatagagctggtatcttgtacgaactatggtacatttgttcatgggaaaagcaagaagataacgaaaagcacttaaattggatcaggaacatctacaatttcatgaccccctacgtttccaagaacccaagattggcttacttgaactacagagatttggatattggtattaacgacccaaaaaacccaaacaattacacacaagcaagaatctggggtgaaaagtatttcggtaagaatttcgatagactagttaaggttaagactttggttgatccaaataacttttttagaaatgaacaatcgattccaccattgcctaggcaccgtcac

SEQ ID NO: 324 - DNA, 1548 bp, Artificial Sequence
  Synthetic
aacccaagagaaaatttcttgaagtgtttctcccaatacatcccaaataatgctacgaaccttaaattagtttatacacaaaacaacccattatatatgtccgtcttaaattctaccattcacaacttgagattcacttctgacaccacacctaagccattagtaattgttacaccatctcacgtttcacatatccaaggtactattttgtgttccaagaaggtcggccttcaaattagaactaggtctggaggtcatgactccgaaggtatgtcttatatttcacaagttccattcgttatagtcgacctaagaaacatgagaagtataaaaattgacgtgcatagtcagaccgcttgggtagaagctggtgctaccctaggtgaagtctattattgggtcaacgagaagaatgaaaacttgtccctagctgctggttattgtccaaccgtgtgtgccggtggtcactttggtggtggtggttacggtccattgatgagaaactacggtttggctgctgataatattatcgacgctcatttagttaacgtccacggtaaagtacttgatcgtaagtctatgggagaagatttgttctgggctttgagaggtggtggtgccgaatcgttcggtattatagttgcttggaaaattcgtttggtcgcagttccaaagtccaccatgttttctgtcaagaagattatggaaatccacgaattggtcaaattggttaacaaatggcaaaatattgcttacaagtacgacaaggacttgttgttgatgactcattttatcacgagaaacatcactgacaaccagggtaagaacaagaccgctatacatacgtatttcagttccgtatttttgggaggtgttgattctttggtcgacctaatgaacaaatctttccctgaattgggtatcaaaaagactgattgccgtcaactttcttggatagacaccataattttttacagcggcgtcgtcaattacgacaccgataacttcaataaggaaattttgttggatagatccgctggccagaatggagcattcaaaataaagttggattatgtcaaaaagcctatccccgaatccgtttttgtccaaattttggaaaaattgtacgaagaagatattggagccggtatgtacgttttgtatccatatggaggaatcatggatgaaatttctgaatctgccattcccttccctcatagagcaggtatcttatacgaattgtggtatatttgttcctgggaaaaacaagaagataatgaaaagcacttgaactggatcagaaacatttacaatttcatgacaccatacgtttcaaagaatcctagattggcctatttgaactacagagatttggacatcggtatcaacgaccctaaaaatccaaataattacacccaagctagaatttggggtgaaaagtattttggtaagaacttcgacagattggtcaaagttaagactttggttgacccaaataatttcttcagaaacgaacagtctatcccaccattaccaagacatcgtcac

SEQ ID NO: 325 - DNA, 1548 bp, Artificial Sequence
  Synthetic
aatccaagagaaaatttcttaaagtgtttctctcaatacattccaaacaacgctaccaatcttaaattggtctacactcaaaataacccattatacatgtccgtcttaaactccaccattcacaacttgcgtttcacttctgataccactccaaaaccattggttattgtcactccatctcatgtctctcatattcagggaacgattttgtgctctaaaaaggttggtttacaaataagaactagatctggtggtcacgatgctgaaggtatgtcctatatttctcaggtcccatttgtcatcgtggacttacgtaatatgagatcaatcaagattgacgttcactctcaaaccgcttgggttgaagctggtgctaccttgggtgaagtttactactgggttaacgagaagaatgagaatttgtcccttgcagctggctactgtccaaccgtgtgtgctggtggtcatttcggtggtggtggttacggtcctctaatgagaaactacggtttagctgctgacaatatcatcgatgctcacttggttaatgtccacggtaaggtcttggatcgtaagagcatgggtgaagatttattttgggccttgagaggtggtggtgctgaatctttcggtatcattgtagcttggaaaataagacttgttgctgttccaaagtctaccatgttttctgtcaagaagattatggaaattcatgaattagttaagcttgtaaataagtggcaaaacattgcttataaatacgacaaagacttgttgttaatgacccatttcatcactagaaacataaccgacaaccaaggtaaaaataaaactgctattcatacttacttctcttccgtgtttttgggtggtgttgattcattggtcgatttgatgaacaagtctttccctgaattgggtatcaagaaaactgactgtagacaattatcttggatcgataccatcatcttctattcaggtgtggttaactacgacactgacaatttcaacaaagagattctattggatagatcagctggtcaaaatggtgccttcaagattaagcttgattatgtgaaaaagccaatccctgaatctgtgttcgttcaaattttggaaaagttgtacgaggaagatattggtgccggtatgtacgctttgtacccatatggtggaatcatggatgaaatatctgaaagtgcaatccctttcccacatcgtgccggtattttatacgaattatggtacatttgctcttgggagaagcaagaagataacgaaaagcacttaaactggattagaaacatttataatttcatgaccccttacgttagcaagaacccaagattggcttatctaaattacagagatttggatataggtattaacgacccaaaaaatccaaataactatacacaggctagaatttggggtgagaagtacttcggtaagaacttcgatagactagttaaggttaagactctggttgacccaaacaatttctttagaaacgaacaatctataccaccactaccaagacataggcat

SEQ ID NO: 326 - DNA, 1548 bp, Artificial Sequence
  Synthetic
aacccacgtgaaaacttcctaaagtgtttctctcaatacattccaaacaatgctacaaatttgaagctagtctacacacaaaacaacccattgtacatgtcagtcttgaacagtactatacataatctaagatttacttctgataccactccaaagccactagtcattgtcacgccctcacatgtgtcacacattcagggtactattttatgttctaagaaggttggtttgcaaatcagaaccagatccggtggtcacgatgccgaaggtatgtcttacatcagtcaagttccattcgttatcgttgatttgagaaacatgagatccatcaagattgatgttcactctcaaactgcttgggttgaagctggtgctactttgggtgaagtatactactgggttaacgaaaagaacgaaaacttgtctttagctgctggttattgtccaactgtttgtgctggtggtcacttcggcggtggtggctacggcccactaatgagaaattatggtttagctgctgataatattatcgatgcacatttggtcaatgtccacggtaaagtcttggataggaaatcaatgggtgaggacttattctgggctttgagaggaggcggtgctgaatcgttcggtattattgttgcttggaagattagacttgttgctgttccaaagtctaccatgttctccgttaagaaaatcatggaaattcacgaactagttaagctggttaacaaatggcaaaatatcgcttacaagtatgataaggacttgctattgatgactcattttataactaggaacatcactgacaaccaaggtaagaataagaccgccattcatacttatttttcttctgttttcttgggtggtgtcgactccttggttgacttgatgaataagtctttccctgaattgggtataaagaaaactgactgtagacaattgtcatggattgacactattatattctactctggtgttgttaactatgacactgataactttaacaaggaaattttgttggataggtctgccggtcaaaatggtgcatttaagatcaagctagactacgttaaaaagcctatcccagaatcagtttttgttcaaatcttggaaaagttgtacgaagaagatatcggtgctggtatgtatgccttgtacccatatggcggtattatggatgagatctctgaatccgctattccctttccacacagagctggtatcttgtatgaattgtggtacatttgtagctgggaaaagcaagaagataatgaaaaacatcttaactggatcaggaatatctataacttcatgactccatatgtgtctaagaacccaagacttgcctatctaaactatagagatttggacatcggtattaacgacccaaagaatccaaacaactatacccaagctagaatctggggtgaaaaatacttcggaaagaactttgataggctggtcaaggtcaagaccttggttgatccaaacaatttcttcagaaacgaacaatccattccaccattaccaaggcatagacac

SEQ ID NO: 327 - DNA, 1548 bp, Artificial Sequence
  Synthetic
aacccaagggaaaacttcttgaagtgtttctcacaatacatcccaaataacgctaccaacttgaagttggtttacactcaaaacaaccccttatacatgtctgttcttaacagtaccatccacaatttgagatttacttctgatactacaccaaagcctcttgttattgtcactccatcccacgtttcacatatccagggtaccattctgtgttcaaaaaaagttggactacaaataagaactagatccggtggtcatgatgccgaaggtatgtcttacatctcccaagtcccattcgttatagttgacttgagaaacatgagatctattaagattgacgtgcactctcaaaccgcctgggtggaagcaggcgctactttgggtgaagtctactactgggtcaatgaaaagaacgaaaacctaagcttggctgcaggttactgtcctactgtttgcgccggtggtcacttcggtggcggtggttacggacctctaatgagaaattacggtttagccgctgataatatcatcgatgctcacttggttaatgtgcacggtaaagttctagatagaaaatcaatgggtgaagatttgttctgggctttgagaggcggtggtgcagaatcattcggtattatcgtcgcctggaagattagattggttgctgttccaaagtcgacgatgttctctgtaaagaagataatggaaattcacgaattggttaagttggttaataaatggcaaaatatcgcttataagtacgacaaggatttgttgttgatgactcacttcataaccagaaacatcactgacaatcaaggtaaaaataagacggcaattcacacctacttcagttctgtattcttgggaggtgttgattctctagttgacttaatgaacaagtcctttccagagttaggtattaaaaaaactgattgtagacaattgtcttggatcgacaccattatcttttactccggtgtcgttaactacgatactgataatttcaataaagaaattctgcttgataggagcgccggtcaaaacggtgcttttaagattaagttagactatgtcaaaaaaccaatcccagagtctgtttttgtccaaatcctagaaaagttatacgaagaagatatcggtgctggtatgtacgctttgtatccatatggtggtattatggatgaaatctccgagtccgctattccattcccacatagggctggtatcttatatgaactatggtacatctgttcttgggaaaaacaagaagataacgaaaagcacttaaactggatccgtaacatctacaattttatgaccccttacgttagtaaaaacccaagactagcttacttaaattatagagatttggatatcggtataaacgatcctaagaaccccaacaattatactcaagccagaatatggggtgaaaagtactttggtaagaattttgacagactagtcaaagtcaaaactttggtcgaccccaacaacttcttccgtaacgaacagtctattccaccactgcctagacatagacac

SEQ ID NO: 328 - DNA, 1548 bp, Artificial Sequence
  Synthetic
aacccacgtgagaacttcttgaagtgcttctctcaatacattccaaacaatgctacaaatttgaaactggtatatacccaaaacaacccactatatatgtcagtcttgaattccaccatccataacttaagattcacctctgataccaccccaaagcctttggttatagttaccccatcccacgtttctcacattcagggtactattctttgctctaagaaggtcggcttgcaaattagaaccagaagcggtggtcacgacgccgaaggcatgtcttacatatctcaagtcccttttgtcatcgtcgacttgagaaacatgagatccattaagatcgatgtccattctcaaactgcttgggttgaagctggtgcaaccttgggagaagtctactattgggtcaatgaaaagaacgaaaacttgtccttggccgctggttactgcccaactgtttgtgccggtggtcacttcggtggtggcggttacggtccattaatgagaaattacggattagctgctgacaacataattgacgcacacttggttaatgtgcatggtaaggttttagatagaaagagtatgggtgaagatcttttctgggctttaagaggtggtggtgctgaaagcttcggtatcatcgtcgcttggaagatccgtttggtcgctgtgcccaagtctactatgttctctgttaagaagataatggaaattcatgaattggtcaagttagttaataagtggcagaacatcgcttacaagtacgacaaggatttgttgttaatgactcactttatcaccagaaacattactgacaatcaaggtaaaaacaaaactgctattcatacttatttctcttccgtttttctaggtggtgttgactcattggtcgatttgatgaataaatcgttcccagaattaggtatcaagaaaactgactgcagacaactttcttggatcgatactattattttctactcgggtgttgtgaactacgatacagataacttcaacaaggaaatcttattagacagatccgctggtcaaaacggcgctttcaagatcaaattggattacgtcaagaaacctatcccagaatctgttttcgtgcaaatcctagagaaattatacgaagaagatatcggcgctggtatgtatgctctttacccttatggtggtatcatggatgaaatttcagagtctgccatcccatttccacacagagctggtatcttgtatgaattgtggtacatttgcagctgggaaaaacaagaagataacgaaaagcacttgaactggataagaaatatctacaactttatgacaccatatgtttctaagaacccaagactagcttaccttaactacagagatctagatattggtatcaatgatcccaaaaacccaaacaactacactcaggccagaatttggggtgaaaaatatttcggtaagaacttcgatagattggtcaaggttaagactttggtcgacccaaacaattttttcagaaacgaacaaagcattccaccactaccaagacatagacat

SEQ ID NO: 329 - DNA, 1548 bp, Artificial Sequence
  Synthetic
aacccacgtgagaacttcttgaagtgcttctctcaatacattccaaataacgccacaaacttaaatttggtttacacccagaataatccattatatatgtcggtcctgaattccacaattcacaatttgcgtttcacatctgatactaccccaaagccattagttatcgtcactccttcccatgtttcacatattcagggtactatcttgtgttccaaaaaggtcggattgcaaatacgtactagatccggtggtcatgactctgaaggtatgtcttacatctcccaagttccattcgtcatcgttgatcttagaaatatgcgtagtattaagatcgatgtgcactctcagaccgcctgggtggaagctggtgctacgttaggtgaagtctactactgggtcaatgaaaagaacgaaaacttatctttggcagctggttactgtccaactgtttgtgctggtggtcactttggtggtggtggttatggacctttgatgagaaactacggtttggctgcagataatatcattgacgctcacttagtaaacgtccacggtaaggttctggatagaaagtcgatgggtgaagatctattctgggccttaagaggtggtggtgccgaaagctttggtatcattgtcgcttggaagattagattggttgccgttccaaagtccactatgttcagtgtaaagaagataatggaaatccatgaattagtgaagttagttaataagtggcaaaacatcgcttacaagtatgacaaggacttgttgttgatgacccacttcattactagaaatattacagacaatcagggtaagaataaaaccgctattcacacttacttctcttctgtatttctaggaggtgtcgactctttggttgacttgatgaataaatcctttcctgaattaggtattaaaaagactgattgtagacaattgtcttggattgacacaattattttctactccggtgtcgtcaattatgatacagataacttcaacaaggaaattttgttggatagatccgctggccaaaacggtgccttcaaaatcaagctagactacgtcaaaaagccaatccctgaatccgtttttgttcaaatcttagagaagttgtacgaagaggacattggtgctggtatgtacgccttgtacccatacggtggtatcatggacgaaatttctgaatctgccatccctttcccacacagagcaggtatcttgtatgaattatggtacatctgtagttgggaaaaacaagaagataacgaaaagcatttgaactggattagaaatatctataactttatgacaccttatgtttctaagaacccaagattggcttacttgaactatagagatctggacatcggtattaacgatccaaaaaacccaaataactacactcaagctagaatttggggtgaaaaatattttggcaaaaacttcgatagattggtgaaggttaagactttggtcgatcccaataacttctttagaaacgaacagtcaatccctccattgcctagacatagacac

SEQ ID NO: 330 - DNA, 1548 bp, Artificial Sequence
  Synthetic
aatccaagagaaaatttcttgaagtgtttctcgcaatacatcccaaataatgccacaaacttgaacttggtctacacccagaacaacccattatacatgtcggttttgaactctactatacacaacttaagatttacgtctgacactacaccaaagccattggttattgttaccccatcccatgtcagtcacattcaaggtactatcctatgttctaaaaaagtaggtttgcaaataagaacgaggtctggtggacacgatagtgaaggtatgtcgtatatctctcaagttccattcgtcatcgtcgatttgagaaacatgcgttccataaaaatcgacgtacactctcaaacggcctgggtagaagccggtgctaccttaggtgaagtctactattgggtcaacgaaaagaacgaaaatttaagcttggctgctggttactgtccaaccgtttgcgctggtggtcactttggtggtggtggatacggtccattgatgagaaactacggtttggctgctgataacattatcgacgctcatttagtcaacgttcatggaaaagtattggaccgtaagtctatgggtgaagatttgttctgggctttgagaggtggaggtgctgagtctttcggtattattgtcgcttggaaaatccgtttggttgccgttccaaagtcaaccatgttctctgtaaaaaagatcatggaaatacatgaattggttaagttggtaaataagtggcaaaacatagcttacaagtatgacaaggatttgttattgatgacccatttcattacccgtaatattactgacaaccaaggaaagaataagactgctattcacacctacttctcttccgtctttttaggtggtgttgactccctagtcgacttaatgaacaaatcatttcctgaattaggcattaagaaaaccgattgtagacagttgtcctggatcgacactataatcttctattcaggtgttgtcaactacgataccgacaactttaacaaagaaatcttgttggacagatctgctggtcaaaacggtgccttcaagattaagttggattatgttaagaagccaattccagaaagcgtattcgtccaaatcttagaaaaattatacgaagaagatattggtgctggtatgtacgctctatacccatatggtggtattatggatgagatcagtgagtcggccattccttttccacaccgtgcaggtattttgtatgaactatggtacatctgttcttgggagaagcaagaagataatgaaaaacatctaaattggatcagaaacatctataacttcatgacaccatacgtcagcaagaacccaagattggcttatttgaactacagagacttggatattggtattaacgatccaaagaacccaaacaactatacacaagccagaatctggggtgagaagtacttcggtaagaactttgatagattagttaaggtaaaaaccttagtggatccaaataacttctttagaaatgaacaatcgattccaccattgccaagacacagacac

SEQ ID NO: 331 - DNA, 1548 bp, Artificial Sequence
  Synthetic
aacccacgtgaaaatttcttaaagtgtttctctcagtacattccaaacaatgctactaatttaaatttggtctacacgcagaacaacccactgtacatgagcgtcttgaactcgacaattcacaacttaagattcacatccgatacaactccaaagccattagttattgttactccatctcatgtatcccatatccaaggcaccatcttatgttcaaagaaggttggtctgcaaatcaggactcgttcgggcggtcacgactctgaaggtatgtcttatatttcccaagttcccttcgtgattgttgacttgagaaacatgagatctatcaaaattgatgtgcactctcaaactgcctgggttgaagcaggagccaccctaggtgaagtctattattgggttaacgaaaagaatgagaatctgtctctggctgctggttattgtcccactgtctgtgccggtggtcactttggtggtggtggttatggtccattgatgagaaattacggtttggctgccgacaacataatagatgcccatttagtcaatgttcatggcaaagtcttggatagaaagtccatgggtgaagatttgttctgggctttaagaggtggtggtgctgaatctttcggtattattgttgcttggaaaattagattggtagccgttccaaagtctaccatgttttctgttaagaagatcatggaaatccatgagttggtcaagttagtcaacaagtggcaaaacatcgcctacaagtacgataaggatttgttgttgatgacccacttcatcactagaaatataactgacaaccaaggtaagaataaaaccgctatacacacttacttttcttccgttttcttaggtggtgttgattctttagttgatttaatgaataaatcattccctgaactaggcataaaaaagacagactgcaggcagttgtcgtggatagatactattatcttctattctggtgttgtcaactatgataccgataactttaataaggaaattttgttggatagatccgctggtcaaaacggtgccttcaaaattaagctagactatgttaagaagccaatcccagaaagtgtatttgttcagatcttggaaaaattgtacgaggaggatatcggtgctggtatgtacgccttgtacccatatggtggaatcatggatgaaatttccgagtctgctattccatttccacacagagctggtattctatacgaattgtggtatatatgttcttgggagaaacaagaagataatgaaaagcacttaaattggattagaaatatctataacttcatgaccccatatgtttcaaaaaatccaagattggcttacttgaactacagagatttggacatcggtattaacgatccaaagaacccaaataactacacccaggccagaatatggggtgagaaatacttcggtaaaaacttcgatagattggttaaggtcaagacattggttgatccaaataacttctttagaaacgaacaatctattccacctttaccaagacaccgtcat

SEQ ID NO: 332 - DNA, 1551 bp, Artificial Sequence
  Synthetic
aatcctcaagaaaacttcttgaagtgtttttctcaatatataccaaccaacgttaccaacgcaaagttggtttatacccaacatgaccaattctatatgtcaatcttaaattctacaattcaaaatctacgtttcacttcggataccacgcctaaacctttggtcatcattactcccttgaacgttagccatatccaaggtaccattttgtgttccaagaaggttggtttacaaattagaactcgttccggtggccatgatgccgaaggaatgtcgtacatatcccaagttccatttgttgtcgtagacctgagaaatatgcattccatcaagattgatgtacattcacagactgcttgggttgaggctggtgccacattaggagaagtttactactggataaacgaaaagaatgaaaatttgtcttttccaggtggttattgtccaactgttggtgtcggtggtcatttttccggcggtggttacggcgcattaatgaggaattacggtttggctgctgacaacattattgatgctcatttggtgaacgtcgatggaaaagttttggacagaaagagcatgggtgaagatttgttttgggctattagaggtggtggtggtgaaaatttcggcattatcgccgcttggaaaattaagttagttgctgttccaagtaaatctactattttctcagttaaaaagaatatggaaatccacggccttgttaaattgtttaacaaatggcagaacatcgcttacaagtatgacaaggacctagtcttaatgactcactttataactaagaatatcaccgataatcacggtaaaaataagactactgttcatggttacttttcatcaatttttcacggtggtgttgactctttagttgacttaatgaacaagagtttcccagaattgggaattaaaaagactgactgcaaggaattctcttggatcgacacaactatcttttattccggtgtcgttaacttcaataccgccaactttaagaaggagatcttattggataggtcggctggtaagaaaacagctttttctattaagttggactatgtcaaaaaaccaattccagaaacggctatggtcaagattttagagaagttatacgaagaggacgttggtgccggtatgtacgttttatacccttacggtggtatcatggaagaaatatcggaatccgcaattccttttccacatcgtgccggtatcatgtacgaattgtggtacactgcttcttgggaaaaacaagaagataacgaaaaacatattaactgggttagatcggtttacaacttcactactccatacgtttctcaaaatccacgtttggcttaccttaactacagagatttggacctaggtaagacaaaccatgcctcccccaacaactacacccaagccagaatttggggtgagaagtatttcggtaagaactttaaccgtttggttaaggttaagactaaggtcgacccaaataacttttttagaaatgaacaatccatcccaccattgcctttgagacatcac

SEQ ID NO: 333 - DNA, 1551 bp, Artificial Sequence
  Synthetic
aatcctcaggaaaacttcttgaaatgtttctctcaatacatcccaactaatgttactaacgctaagctggtctacacgcaacacgaccaattctacatgtccatactgaattctactatacaaaacttgagatttacttcagacactactccaaagcccttggttatcattactcccttaaacgtatcccacatccagggtacaatcttatgtagtaagaaggtcggtctacaaattcgtactagatccggtggtcacgatgctgaaggtatgtcttacatctcgcaagtcccatttgttgttgtcgacttacgtaacatgcactctatcaagattgatgttcactctcaaaccgcatgggttgaagctggtgctactttgggagaagtttactactggatcaatgaaaagaacgaaaacctatcttttccaggcggttactgccctacagtcggtgtcggtggtcacttctctggtggtggttacggcgctctgatgcgtaattatggtttggccgctgataacatcattgacgctcacctagtcaatgttgacggtaaggttttagaccgtaaatctatgggtgaagatttattttgggctattcgtggtggtggtggtgaaaacttcggcatcatcgccgcttggaaaattaaattagttgctgtccctagcaagtccactatcttcagtgttaagaaaaatatggaaattcacggtttagtgaaattattcaacaaatggcagaacatagcctacaagtacgataaagacttggttttaatgactcatttcattactaagaatattactgataaccacggtaagaacaaaaccactgtacacggctatttctcttctatttttcacggcggtgttgattctttggtggatttgatgaataagtctttccccgaattaggtattaagaaaactgattgcaaggaattttcttggattgataccaccatcttctactccggcgtggttaactttaacaccgctaacttcaagaaagaaatcttgttagacagatccgccggtaaaaagacggccttttctattaaattggactacgtcaagaagcctatcccagaaactgctatggtcaagattttggaaaagttgtacgaagaagatgtcggtgctggtatgtatgttctatacccatacggtggtatcatggaagaaatttctgaatcagctatcccattcccccaccgtgccggtatcatgtacgagttgtggtacactgcctcttgggaaaagcaagaagataatgaaaagcacatcaattgggtaagatcagtctataattttaccactccatatgtatctcaaaacccaagattggcatatttaaactacagagatttggacttgggtaagactaaccacgcttctccaaacaactatacccaagctaggatttggggtgaaaagtacttcggtaagaatttcaatagactggttaaggttaagactaaagtcgacccaaacaacttcttcagaaacgaacaatccatccccccactaccattgagacatcac

SEQ ID NO: 334 - DNA, 1551 bp, Artificial Sequence
  Synthetic
aacccacaagaaaactttctaaagtgtttttctcaatacattccaaccaatgttactaacgctaagttagtctatacccaacatgatcaattttacatgtcaatcttgaattctactattcaaaatcttagattcacatctgacactacccctaagccactagtcatcatcactccactgaacgttagtcacattcaaggtaccatcctttgctctaaaaaggttggtctgcaaattagaacacgttctggtggtcatgacgctgaaggtatgtcttacatttcacaggtccctttcgtcgtcgttgatctgagaaatatgcacagtattaagatcgatgttcattctcaaaccgcctgggttgaagctggtgctactctaggagaagtatactattggatcaatgaaaaaaatgaaaatttatctttcccaggtggttattgtccaaccgttggtgttggcggtcatttctctggtggtggttacggtgcattaatgaggaactacggtttagctgccgacaacatcatagatgctcacttggttaacgtcgatggtaaggttttggacagaaagtctatgggcgaagatttgttctgggctattcgtggtggtggcggtgaaaactttggtatcatcgctgcatggaaaatcaagttggtcgccgttccctccaaatccaccatttttagcgtcaaaaagaacatggaaattcatggtctagttaagctattcaataagtggcaaaatatcgcttataaatacgacaaggaccttgttttgatgacccactttatcactaagaatataactgacaaccacggtaagaacaagactactgtacacggttatttttcttccatttttcatggtggtgtcgacagtttagtcgatttgatgaacaagtctttcccagaattgggtatcaaaaagactgactgtaaggaattctcgtggatcgacaccactattttttactctggtgtcgtcaactttaacacagctaattttaagaaggagattttattggacagaagcgccggtaagaaaactgccttctcgattaaattagactacgttaaaaagccaatcccagaaaccgctatggttaagattttggaaaagctatatgaagaagatgtcggtgccggaatgtatgttctatacccttacggtggtatcatggaagaaatctcggaaagcgctattccattcccacatagagctggtatcatgtacgaactttggtatactgcatcttgggaaaagcaagaggataacgaaaagcacattaattgggttagatctgtttacaatttcactaccccctacgtttcccaaaatccaagattggcctacctaaattacagagatttggatttaggtaagaccaaccacgctagtcctaacaactatacccaagctagaatttggggtgaaaagtactttggtaagaactttaacagattggtcaaagttaagaccaaagttgaccctaacaactttttcagaaacgaacaatctatcccaccactaccattgagacaccac

SEQ ID NO: 335 - DNA, 1551 bp, Artificial Sequence
  Synthetic
aacccccaagaaaatttccttaagtgtttctctcaatatattccaactaatgtaactaatgctaagttggtttacactcaacacgatcaattctacatgtccatcttgaactctacaattcaaaacttgagattcacctctgatactactccaaagccattagtcataattacgccattgaatgtttctcatattcaaggtacaatcctttgttctaagaaagttggtttacaaataagaacgagatccggcggccacgatgctgaaggtatgtcttacatttcccaagttccattcgtcgttgtggatttgagaaatatgcactcgatcaaaattgacgttcattctcaaacagcttgggtagaagctggtgccacacttggtgaagtctactattggatcaacgaaaagaatgaaaacttgagttttccaggtggttattgtccaactgttggtgtcggtggtcatttttcgggtggtggttacggtgccttaatgagaaactacggtttggctgctgacaacatcatcgacgctcacttggtcaacgttgacggaaaagttttggacagaaaatctatgggagaggacttgttctgggctattcgtggtggtggtggtgaaaatttcggtattattgctgcctggaagataaaattggttgccgtcccaagcaagtctaccatattttcagtcaagaagaacatggaaattcatggtctggtcaagttgttcaacaaatggcaaaatattgcttacaagtacgataaggacctagtgttgatgactcacttcattactaagaatattaccgacaatcatggtaagaacaagactaccgttcatggttacttctcatctatcttccacggtggtgttgattccttggttgatttgatgaataagtccttcccagaattaggtattaaaaagaccgactgtaaggaattctcctggatagatactaccattttctactcaggagttgtcaactttaacaccgccaatttcaagaaggaaatattgttggacagatcggctggtaagaaaaccgctttctcaatcaaacttgactacgttaagaagcccattccagaaactgccatggtcaagattttggagaagttgtatgaagaggacgttggtgccggtatgtacgtgttatatccatacggtggtattatggaagagatttcagagagtgcaatcccattcccacacagagctggcatcatgtacgaattgtggtacacagctagttgggaaaagcaagaagataatgaaaagcacatcaactgggttagatccgtttacaactttactactccatatgtgtctcaaaacccaagactggcttacttaaactatagagatctggacttgggcaagactaaccatgctagtcctaacaactacactcaagctcgtatttggggtgaaaagtactttggtaaaaactttaaccgtttagttaaagttaagactaaagtggatccaaacaattttttcagaaacgaacaaagtatcccacccctaccactaagacatcat

SEQ ID NO: 336 - DNA, 1551 bp, Artificial Sequence
  Synthetic
aacccacaagaaaatttcttgaagtgtttctctcaatacatcccaaataatgtcgctaatccaaaactggtctacactcaacacgaccagttgtatatgtctattttgaattctactatccaaaatttgagattcacctccgatactactcctaagccattggttatagtgacaccaagtaatgtatctcacatacaagctactatcctatgttctaagaaagttggtttacagatcagaaccagatctggtggtcacgacgctgaaggtatgtcttatatttcccaagtcccctttgttattgtcgacttgagaaacatgcactccatcaaaatagatgttcactcacagactgcatgggtagaagctggcgctacgttgggtgaagtttactactggattaacgaaaagaatgaaaacttatcatttccaggtggttactgtccaactgtcggtgttggaggtcacttttcaggtggtggttatggtgcccttatgagaaactacggtttggctgctgacaatattattgacgctcacttggttaacgtagacggtaaagttttggatagaaagagtatgggtgaggaccttttctgggccattagaggtggaggtggtgaaaatttcggtatcatcgctgcttggaagattaagttagtcgccgtgcctagtaaatctactatattttccgtcaagaagaatatggagattcatggtctggtcaagttgtttaacaagtggcaaaacattgcatataagtatgataaggacttgttactaatgacccatttcattaccagaaacattactgacaaccatggtaagaacaagaccaccgtacatggttatttctcttctatcttccacggtggtgttgattccttagttgacctaatgaacaagtccttcccagaacttggtattaaaaagacagactgcaaagaattgtcatggattgacacgactatcttttactcgggtgttgttaattacaacactgctaacttcaaaaaggaaatattattggacagatctgccggtaagaaaaccgctttttctatcaaattagattacgtcaagaaaccaatccccgaaaccgcaatggttaagattctagagaagttgtacgaagaagatgttggtgtaggtatgtatgttttgtatccatacggtggtatcatggacgaaatcagcgaatcagccattccctttcctcatagagctggaatcatgtacgaattatggtacactgcttcctgggaaaaacaggaggacaacgaaaaacacattaactgggtgcgttctgtttataatttcactaccccatacgtttctcaaaatccaagattggcttatttaaattaccgtgacctggatcttggtaaaactaaccctgaatctccaaacaactacactcaagcacgtatatggggtgaaaagtatttcggtaagaacttcaacagactggttaaggttaagactaaggttgacccaaataactttttcagaaacgagcaatcaattccaccattgcctccccaccaccac

SEQ ID NO: 337 - DNA, 1551 bp, Artificial Sequence
  Synthetic
aatccccaagaaaacttcttgaagtgcttcagccaatacatcccaaacaacgtcgcaaaccctaagttggtttacacccaacacgaccagctttacatgtccatcttgaattccaccattcaaaacttgagattcacttctgacaccacccctaaaccactagttattgtgacaccatctaacgtttctcacatccaagctaccatactgtgttccaagaaggtcggtttgcaaatcaggaccagatccggcggtcatgacgctgaaggtatgtcctacattagtcaagttcctttcgtcatcgtcgatctgagaaatatgcattctattaagatcgatgtacattcacaaacagcttgggtcgaagccggtgctactttgggtgaagtctactattggatcaacgaaaaaaacgaaaatttaagttttccaggtggttactgtccaaccgttggtgttggtggtcacttctcaggtggaggctatggtgctttaatgagaaactacggtttggctgctgataatatcatcgacgctcatttagttaatgttgatggtaaggttttggacagaaagtcaatgggtgaggacttattctgggctattagaggtggtggtggtgaaaactttggaattatcgccgcttggaagatcaagcttgttgccgttccctccaagtctaccattttttctgttaagaagaacatggagatccatggtttggttaagttattcaataaatggcaaaatatcgcctataaatacgataaggatttgttattgatgactcatttcattacccgtaacattaccgataatcacggtaaaaacaaaaccactgtccacggttatttctctagtatttttcacggtggtgttgactcgctagtagacttgatgaacaagtctttcccagaattaggtatcaagaaaactgattgtaaggaactatcctggattgacaccactatattttattctggtgttgtcaattacaacacagccaatttcaagaaggaaattttactagatagatctgctggtaagaaaactgccttctctataaagcttgattatgttaagaaaccaatcccagaaaccgctatggtcaaaatattagaaaaattgtatgaagaggatgttggcgttggcatgtacgttttatatccctacggtggtataatggatgaaatctcagaatccgctattccattcccacacagagccggtataatgtacgaattgtggtacaccgcctcctgggaaaagcaagaagataacgaaaagcacattaattgggttagatcagtttacaatttcactaccccatatgtttctcaaaacccaagattggcttacttgaactacagagatcttgatttgggaaagactaatccagaatctcctaataattatacacaagccagaatctggggtgaaaaatacttcggcaagaattttaacagattggttaaggtcaagactaaggttgatccaaataacttctttagaaacgaacaatccataccaccattaccaccacatcatcac

SEQ ID NO: 338 - DNA, 1551 bp, Artificial Sequence
  Synthetic
aacccacaagaaaactttttgaagtgtttcagtcaatacatccctaataatgttgccaatccaaaattggtctatactcaacacgatcaattgtatatgtccattcttaattccactattcaaaacttaagatttacttccgacaccacaccaaagccactggttattgtcactccatcaaatgtctcccacatccaagccactattttatgtagcaagaaagttggtttacaaattagaaccagatctggtggtcatgacgctgaaggtatgtcctacatctctcaagtcccattcgttattgtcgacttgagaaacatgcactccattaagatagatgttcactcccaaacagcttgggttgaagccggtgctaccttgggtgaagtctactattggattaatgaaaagaatgaaaatttgtcattccccggtggttactgcccaactgttggtgtcggcggccacttctccggtggtggatatggtgctttgatgagaaactacggtttggcagccgataacattattgacgctcatttagtaaacgttgacggtaaggtcttggatcgtaagtctatgggcgaggacttgttctgggctattagaggcggtggcggtgaaaacttcggtattatagcagcttggaaaatcaagttggtggccgtcccatcaaaatctaccatctttagcgttaaaaagaacatggaaatccacggcttagttaaacttttcaacaaatggcaaaacatcgcttacaagtatgataaggatttattattgatgactcatttcatcaccagaaatatcactgacaaccatggtaaaaacaaaacaaccgtccacggttacttctcttctattttccatggtggtgttgactccttggtcgacttgatgaacaagtccttcccagaactaggaatcaaaaagacggactgtaaggagttgtcctggattgataccaccatcttttactccggagtcgtcaattacaacacagcaaatttcaaaaaggaaattttattagatcgttccgctggtaagaaaactgccttcagcattaagttggactacgtaaagaagccaattccagaaaccgccatggtgaaaattctagaaaaattgtacgaggaagatgtgggtgttggtatgtacgtcttgtatccatacggtggtattatggatgagatctctgaatcggcaattccatttccacaccgtgctggtattatgtatgaattgtggtacactgcctcatgggagaagcaagaagataacgaaaaacatataaattgggttagatccgtatataactttaccactccatacgtttcccaaaatccaagactggcttatttgaattaccgtgacttagacttgggtaaaacaaacccagagtccccaaacaactacactcaagccagaatttggggtgaaaagtacttcggtaagaactttaacaggttagttaaggtcaagactaaggttgacccaaataatttcttcagaaacgaacaatccatccctccattgcctccccaccaccac

SEQ ID NO: 339 - DNA, 1551 bp, Artificial Sequence
  Synthetic
aatccacaagaaaacttcttgaagtgttttagtcaatacatccctaataacgttgccaaccccaaattggtatacactcaacacgaccaattgtatatgtctatcttgaattccacaattcaaaatttgagatttacctctgacaccactccaaagccattggttatcgttactccatctaacgtttcccacatccaagctaccatattatgttcaaaaaaggttggtttgcaaatcagaacaagaagtggaggacacgatgctgagggtatgtcctatattagtcaagtgccattcgtaattgttgatcttagaaacatgcacagtattaaaatcgacgttcatagtcaaacagcttgggttgaagctggtgctaccttaggtgaagtttattactggataaatgaaaagaacgaaaacctatcttttccaggtggttattgcccaactgtcggtgtcggcggacatttctctggtggtggttacggtgctttgatgagaaactatggtttggctgctgataacattatagacgctcatttagttaacgttgatggaaaagttttggatagaaagtccatgggtgaagatttgttctgggctataagaggtggaggtggtgaaaacttcggtattatcgctgcttggaagattaagttggtcgccgttccatcaaagtccaccattttttccgtcaaaaagaacatggagattcacggtctggttaaattgttcaacaaatggcaaaacatcgcatacaagtatgacaaggacttgttgttaatgacccatttcatcacaagaaacataactgataaccacggtaagaataagactactgtgcacggttacttctcttcaatctttcacggtggtgttgactcactagtggatttgatgaacaagtcgtttccagaactaggtataaagaaaacagactgtaaggaattgtcttggattgacactactattttctacagtggtgtcgttaattataacaccgcaaacttcaaaaaggaaatattattggacagatctgctggtaaaaaaacggctttctccattaagttggactatgttaagaagccaattccagaaaccgctatggtgaagattttggaaaagctttacgaagaagatgtcggtgttggtatgtatgttttgtacccatacggtggtatcatggatgaaatctcagaatcggctatcccatttccacacagagctggtatcatgtacgaactttggtacacggcttcatgggaaaaacaagaagataatgagaaacacatcaattgggtcagatctgtctacaacttcacaactccatacgtttctcaaaacccaagattggcttatctgaactacagagatttagacttgggtaagactaaccctgagtcccctaacaactatactcaagccagaatctggggtgaaaagtactttggtaagaacttcaacagacttgtaaaggttaaaaccaaggtcgatcctaacaacttctttagaaacgagcaatctatcccaccacttccaccacatcaccac

SEQ ID NO: 340 - DNA, 1551 bp, Artificial Sequence
  Synthetic
aacccacaagaaaatttccttaaatgtttctcccagtatatcccaaataacgtcgctaacccaaaattggtctatacacaacatgaccagctatatatgtctatcctaaactcgacgattcaaaatttaagattcaccagcgacacaaccccaaagccattggtgattgtcaccccatccaatgttagtcacatacaagcaaccatcttgtgcagcaagaaggtcggtctacaaataagaaccagatccggtggtcatgacgctgaaggtatgtcttatatctctcaagtaccattcgtcatcgtcgacttacgtaacatgcactccattaaaattgacgttcactcgcaaaccgcatgggttgaagccggagctaccttaggtgaggtttactattggatcaacgagaaaaatgaaaacttgtctttcccaggcggctactgcccaactgtcggtgttggtggtcacttcagtggtggtggttacggtgcccttatgagaaattatggcctagctgccgataacattatcgacgcacacttggtcaatgttgacggtaaggttttagatagaaagtccatgggtgaagatttattctgggctattcgtggtggcggtggtgagaacttcggtatcatcgccgcttggaaaataaagttggttgctgttccatcaaagtcaaccattttttctgttaaaaagaatatggaaatccatggtttagttaagcttttcaacaagtggcaaaacatcgcttacaaatatgacaaggatttgttgttgatgacacatttcataactcgtaatatcactgataaccacggtaaaaacaagacaacagttcatggttacttctcctctatatttcatggtggtgtcgattctctagttgaccttatgaacaaatcgttccccgaattaggtatcaaaaagaccgactgcaaggaattatcttggattgatacaacaatcttctactccggagtggtcaactataacaccgccaatttcaagaaggaaatcttgctggatcgttctgctggtaagaaaactgccttttccatcaaattagattacgttaagaagcctattccagagacagctatggtcaagatcttggaaaagctttatgaagaagatgtgggcgtgggtatgtacgtgctttacccttatggtggtataatggacgaaatttctgaatctgctattccatttccacacagagccggtattatgtatgaattgtggtacactgcttcttgggagaaacaagaagataacgagaagcatattaactgggtccgttctgtctacaactttacgactccatatgtaagccaaaacccaagattggcttacttgaattatagagacttggacttaggcaagaccaaccctgaatctccaaacaactatactcaagctagaatctggggtgaaaagtatttcggtaaaaactttaacagattggtcaaggtcaagactaaagtcgatccaaataactttttccgtaatgaacaatcgatccctccattgccacctcatcatcat

SEQ ID NO: 341 - DNA, 1551 bp, Artificial Sequence
  Synthetic
aatccccaagaaaacttcttaaagtgtttctctcaatatatcccaaataacgtagccaaccctaaattggtctacacccaacatgatcaactatatatgtctatcttgaactctaccattcagaaccttagattcacttcggataccactccaaaaccattggtcattgtaactccatccaacgtatctcatatccaagctactatattgtgctccaaaaaggttggtttgcaaattagaactagatcgggtggtcacgacgctgaaggcatgtcgtacatttcccaagttcctttcgttatcgttgatttgagaaacatgcactccatcaagattgatgtccactcccaaaccgcttgggttgaagctggtgccaccctaggtgaagtctattattggattaacgaaaagaacgagaatttgtctttcccaggtggttattgcccaaccgtaggtgtcggtggtcatttttcgggtggtggttacggtgccttgatgagaaattacggtttggctgctgataacatcatagacgctcacttggttaatgttgatggcaaggtcttagatagaaagtccatgggtgaggatttgttctgggctatccgtggtggtggtggtgagaacttcggcatcattgccgcttggaagatcaagttagttgctgtcccatcaaaaagcacaattttttctgtcaagaagaatatggaaatccacggtttagttaagttatttaataagtggcaaaatatcgcctacaagtacgataaggacttgttattgatgacacatttcataaccagaaacatcactgacaatcacggtaagaataaaactacagtccacggttacttctcctcgatttttcacggtggtgtagatagtttggtcgatctgatgaacaaaagtttcccagaactgggaatcaaaaagactgattgtaaggaattatcttggattgacactacaattttctattctggtgttgttaattacaacactgctaacttcaagaaagaaatcctattagacagatccgctggtaaaaaaactgctttctctatcaaattggactacgtgaaaaagccaattccagagactgctatggtaaaaatcttagaaaagttgtatgaagaggacgtcggtgttggtatgtatgtactgtacccttacggtggtattatggacgaaatttccgaatccgctattccatttcctcacagagctggtatcatgtacgaattgtggtacactgcttcttgggaaaaacaagaagataatgaaaagcacattaactgggttagatccgtttacaatttcaccacaccatatgtgtcccaaaatccaagacttgcttatttgaattacagagatttggacttgggtaagacaaatccagaatcccctaacaactacactcaagctcgtatctggggtgagaagtactttggtaagaactttaacagattggttaaagttaaaactaaggtcgatccaaacaactttttccgtaacgaacaatccatcccaccacttccaccacatcatcat

SEQ ID NO: 342 - DNA, 1551 bp, Artificial Sequence
  Synthetic
aacccacaagaaaacttccttaaatgcttctcgcaatacattccaaacaacgttgctaaccctaagttagtgtatactcaacatgaccaactttacatgtccattttgaattctaccattcaaaacttgagattcacctcagacactactccaaaacccttggtcatcgttacaccatccaacgtttctcacattcaagctactatcttatgctccaagaaggttggtctgcagattagaacacgttcaggtggtcatgacgccgagggtatgtcctatatttcccaagtccctttcgttattgttgatttgcgtaatatgcattctatcaagatagatgttcactcgcaaactgcttgggtggaagctggtgccaccttgggtgaagtttactactggattaacgaaaagaacgaaaacctaagtttccctggtggttactgtccaactgtcggtgttggtggtcacttttcaggtggtggttacggtgcactgatgagaaactatggtttggctgctgataacattattgatgctcacttggttaatgtcgacggaaaggttttagatcgtaagtccatgggtgaagatttgttttgggctatcaggggtggcggtggtgagaacttcggtatcatcgctgcttggaaaattaaattggttgctgttccctccaaatctaccattttttctgtcaaaaagaacatggaaattcacggcttagtcaagttgttcaataagtggcaaaacatagcttacaagtatgataaggacttgttgttaatgacccatttcataaccagaaacattaccgataatcatggtaagaataagaccacagtccacggttatttctcctctatcttccacggtggtgtcgactctctggtcgatttgatgaacaaatcgttcccagaactaggtataaaaaagacagactgtaaggaattgtcctggatcgacaccactattttctactctggtgtcgtaaactacaacactgcaaacttcaagaaggaaattttgttggacagaagtgctggtaaaaagactgctttttccatcaagttggattacgtcaagaaaccaattcctgaaactgccatggtcaagatcttggaaaagttatatgaagaagatgtgggtgttggcatgtacgttttgtatccttacggtggtatcatggatgaaattagtgaatcagctattccctttccacacagagctggcatcatgtacgaattgtggtacactgcttcctgggaaaaacaagaagataacgaaaaacacatcaactgggttagatccgtttacaactttactaccccatatgtctctcaaaatccaagattggcttacttgaattacagagatttggacttgggtaaaaccaacccagaatccccaaataattatactcaagcaagaatctggggcgaaaaatacttcggaaagaattttaacagattggtcaaggttaaaactaaggtcgaccctaacaattttttcagaaacgaacaatcaatccctcctttgccaccacaccaccac

SEQ ID NO: 343 - DNA, 1551 bp, Artificial Sequence
  Synthetic
aacccacaagaaaactttttaaagtgtttctctcaatatatcccaaacaacgttgctaacccaaaattggtttatactcaacacgaccaattgtacatgtctatcttgaattctaccatccaaaatcttcgttttacctcagacacgaccccaaaacctttggttatcgttactccctccaacgtatctcacattcaagctacaattctgtgttctaagaaggtaggtttacaaatccgtactagatctggtggtcatgatgctgaaggtatgtcttacatttctcaagtgcctttcgtcatcgtcgacttgaggaacatgcactctatcaagattgacgttcactctcaaactgcttgggtcgaagccggagctacgctaggtgaagtctactactggataaacgaaaagaacgaaaacctgtcctttcctggtggttactgcccaaccgtcggagttggaggtcacttctctggaggcggttacggagctttgatgagaaattatggtctggctgctgacaatattattgacgcccacttagtcaacgtagatggtaaggtcttggacagaaaatctatgggagaggatttgttctgggctattagaggtggtggcggtgaaaacttcggtattattgccgcctggaagataaagttggtggctgttccatccaaatctactatcttttctgttaagaagaacatggaaatacatggtttggtcaagttgtttaataagtggcaaaatattgcttacaagtatgataaagacttgttgttgatgactcattttatcacgagaaatattactgacaaccacggtaagaacaagactacggttcacggttacttttcctctatcttccacggtggtgtcgattctttggtagatttaatgaacaagtcattcccagaattgggtattaagaaaaccgattgcaaagaattgtcttggatcgatactactatcttctacagtggagttgtcaattataacaccgctaactttaaaaaagaaattttgttagacagatccgctggtaagaaaactgctttctccatcaagttggattacgtcaaaaagccaatacctgaaactgccatggttaaaattttggaaaaactgtatgaagaagatgttggcgttggaatgtacgtgttatatccttacggtggtataatggatgaaatctctgagtctgcaattcccttcccacacagagctggtattatgtacgaattgtggtataccgctagttgggaaaagcaagaagataacgaaaaacatattaactgggttagatccgtttataactttactaccccatacgtttcccaaaacccaagactagcttaccttaattatagggacctagatttaggaaagaccaacccagaatccccaaacaattacacacaagctagaatttggggtgagaagtacttcggtaagaactttaaccgtctggtcaaagttaagaccaaggttgatccaaacaatttcttcagaaacgagcaatccatcccacctttacctccacatcatcat

SEQ ID NO: 344 - DNA, 1551 bp, Artificial Sequence
  Synthetic
aacccacaagagaacttcttaaagtgtttctcccaatacattcccaacaacgtcgccaatccaaagcttgtctacacccaacatgaccaattgtatatgtcaattctaaattctacaattcaaaacttgagatttacttcagacactacacctaaaccattagttatagtaaccccaagcaatgtttctcacattcaagctacaatcttgtgttcgaagaaggttggtttgcaaatcagaacaagaagtggcggccacgacgctgaaggtatgtcttatatttcccaagtcccattcgttattgtcgacttgaggaacatgcactcgattaagatcgacgtccattcccaaaccgcttgggttgaagccggtgctactttgggtgaagtttactactggattaatgaaaagaacgagaatttgtcttttccaggtggttactgtccaactgtcggtgttggtggtcacttcagtggtggaggttacggtgctctgatgagaaattacggtttagctgctgacaatattattgacgctcatttggtcaatgtcgacggtaaagttttggacagaaagagtatgggtgaggatttgttttgggctatcagaggtggtggtggcgaaaacttcggtattatcgctgcttggaagattaaactagttgccgtaccatccaagtctaccatattctcggttaaaaagaatatggaaattcatggtttagtgaaattgttcaataagtggcaaaacatcgcttataagtacgataaggacctgctattaatgactcattttatcactagaaatataacagataaccatggtaaaaataaaactactgttcacggttacttctcctccatatttcacggtggtgttgatagcttggtagatttgatgaacaagagcttcccagaattaggtattaaaaaaaccgattgtaaggaattgtcatggattgatactaccattttctattcaggtgttgtcaactacaacactgcaaacttcaaaaaggaaatccttttggaccgttcggccggtaagaaaactgctttctctattaaactggattacgttaaaaagccaataccagaaaccgccatggtcaagattttggaaaagttgtatgaagaagatgtcggtgtcggtatgtacgttctatatccatatggtggtatcatggatgaaatctctgaatctgctattccatttccacacagagcaggtattatgtatgaattatggtacactgcatcttgggagaagcaagaggataacgagaagcacatcaactgggtaagatctgtctacaacttcaccactccatacgtttcccaaaacccaagattggcttacttgaactatagagacttggatttaggtaagactaaccctgagtcgccaaacaactacacccaagctagaatctggggagaaaagtatttcggtaagaacttcaaccgtttggtcaaggtcaaaacaaaggttgatccaaataacttttttagaaacgaacaatctatccccccattaccaccacaccaccac

SEQ ID NO: 345 - DNA, 1551 bp, Artificial Sequence
  Synthetic
aatccacaagaaaatttcttgaaatgcttctctcaatacattccaaacaacgtcgctaatcctaagttggtctacacacagcacgaccaattatacatgtctattctaaattccactattcaaaatctgaggtttacatctgatacgaccccaaagccattagttatcgtgactccatccaatgtctctcatattcaagcaaccattctatgttctaagaaggttggtttacaaattagaactagatccggcggtcacgatgctgagggaatgtcctatattagccaagtcccttttgttatcgtcgatttgagaaacatgcattctattaagattgatgttcactctcaaactgcctgggtcgaagctggtgctactctgggtgaagtatactactggatcaacgaaaagaatgaaaatttgtctttcccaggtggttactgtcctacagttggtgttggaggacatttctcaggtggaggatatggtgctttgatgagaaattatggtttggctgcagataatattattgacgctcacttggttaacgtcgatggtaaggtcttggatcgtaagtctatgggtgaagatttattctgggcaatcagaggtggtggtggtgaaaacttcggtattatagccgcttggaagattaagttggtggcagtcccatccaagtcaacaattttcagtgtcaaaaaaaatatggaaatccacggtttggttaaacttttcaacaaatggcagaatattgcatacaagtatgacaaagacttgctactaatgacccactttattactagaaacattactgataaccacggtaagaataagactactgttcacggttatttctcctctattttccatggtggcgttgactctttggtcgacttgatgaataagtccttcccagaattgggtattaaaaagactgactgcaaggaattatcttggattgacactactattttctatagcggtgttgttaactacaatactgctaactttaaaaaagaaatcttgttggatagatctgccggtaaaaagaccgctttctccatcaaactggattacgtcaagaagccaattccagaaaccgccatggttaaaattttggaaaagctatacgaagaagatgtgggtgttggtatgtacgttttgtacccatatggtggtatcatggacgaaatttctgagtctgctattccatttccccatagagccggtatcatgtacgaattatggtacacagcttcctgggaaaagcaagaagataacgaaaagcacatcaactgggtgagatcagtttataactttaccactccttatgtttctcaaaaccctagattggcttacctaaattacagagatttggatttaggtaagactaacccagaatctcctaacaactacactcaagctagaatatggggtgaaaaatatttcggtaaaaacttcaacagattggttaaggttaagaccaaggttgatccaaacaatttctttagaaatgaacaatcaattccacctttgccaccacatcaccac

SEQ ID NO: 346 - DNA, 1551 bp, Artificial Sequence
  Synthetic
aatccccaagagaactttcttaagtgtttcagtcagtatatcccaaataacgtggcgaatccgaaattagtatacacgcaaaacgatcagctatattccagcattctgaatagtaccattcaaaacttgcgctttacatcggacacaactccaaagcctttagtcatagttactccttcaaatgtttcccatattcaggctacaatcctctgctctaaaaaagttgggttgcaaatacgtactagatcaggaggccacgatgccgaaggtatgtcttatatctcccaagtgccattcgttattgtcgacttgaggaacatgcattctattaagattgatgtacactcccagaccgcatgggttgaagctggtgccacattaggtgaagtatactattggataaacgagaaaaatgaaaatttatcgtttcctggaggctattgtccaactgttggtgtcggtggtcatttctcaggcgggggctacggagcattgatgcgaaactacggactagcagctgataacattatagacgcccatctcgtgaatgtggatggtaaagttcttgatagaaagagcatgggtgaagatttgttttgggcgatcagaggcggtggaggggaaaactttggtattattgcggcttggaaaataaagctggtcgcagttccctcgaaagtaacaatcttttctgtaaagaaaaatatggaaatacatgggttggtcaagttattcaataaatggcaaaacattgcttataagtatgataaagacctcctgctgttcactcattttattacgaggaatattaccgacaatcacggtaagaataaaactacagtgcacggttacttttcttcaattttccatggtggcgttgactctctagtagatttaatgaacaaaagtttccctgagttagggatcaagaaagaggattgtaaagaactatcttggatcgacacaatcatattctattcgggtgttgttaactacaataccgcaaactttaaaaaggaaattttgttagatcgctctgctggaaagaaaacagcatttagtatcaaacttgactatgtaaagaaaccgatacccgagactgccatggttaagatacttgagaagctatacgaagaggatgtgggagtcggcatgtacgttctctacccttacggcggtataatggatgaaatttcagaatccgcaatcccattcccacacagagcaggtattatgtatgaactgtggtatactgcctcatgggagaaacaagaagataacgaaaaacacattaattgggtccgtagcgtctacaatttcactacaccatatgtatccaagaacccgagattggcttacttgaattatagagacttggatctaggaaaaaataatcccgaaagcccgaataattatacacaggcaaggatttggggcgagaagtatttcggcaagaacttcaacagattagtaaaagttaagaccaaagttgaccccaataacttttttagaaatgaacaaagtatccctccactcccaccacatcatcat

SEQ ID NO: 347 - DNA, 1551 bp, Artificial Sequence
  Synthetic
aatccccaagagaactttcttaagtgtttcagtcagtacatcccaaataacccggcgaatccgaaattagtatacacgcaacacgatcagctatattctagcattctgaatagtaccattcaaaacttgcgctttacttcggacacaactccaaagcctttagtcatagttactccttcaaatgtgtcccatattcaggctacaatcctctgctctaaaaaagttgggttgcaaatacgtactagatcaggaggccacgatgccgaaggtatgtcttatatctcccaagtgccattcgttattgtcgacttgaggaacatgcattctattaagattgatgtacactcccagaccgcatgggttgaagctggtgccacattaggtgaagtatactattggataaacgagaaaaatgaaaatttatcgtttcctggaggctattgtccaactgttggtgtcggtggtcatttctcaggcgggggctacggagcattgatgcgaaactacggactagcagctgataacattatagacgcccatctcgtgaatgtggatggtaaagttcttgatagaaagagcatgggtgaagatttgttttgggcgatcagaggcggtggaggggaaaactttggtattattgcggcttggaaaataaagctggtcgcagttccctcgaaagtaacaatcttttctgtaaagaaaaatatggaaatacatgggttggtcaagttattcaataaatggcaaaacattgcttataagtatgataaagacctcctactgtttactcattttattacgcggaatattaccgacaatcacggtaagaataaaactacagtgcacggttacttttcttcaattttccatggtggcgttgactctctagtagatttaatgaacaaaagtttccctgagttagggatcaagaaagaagattgtaaagaactatcttggatcgacacaaccatattctattcgggtgttgttaactacaataccgcaaactttaaaaaggaaattttgttagatcgctctgctggaaagaaaacagcatttagtatcaaacttgactatgtaaagaaaccgatacccgagactgccatggttaagatacttgagaagctatacgaagaggatgtgggagttggcatgtacgttctctacccttacggcggtataatggatgaaatttcagaatccgcaatcccattcccacacagagcaggtattatgtatgaactgtggtatactgcctcatgggagaaacaagaagataacgaaaaacacattaattgggtccgtagcgtctacaatttcactacaccatatgtatcccaaaacccgagattggcttacttgaattatagagacttggatctaggaaaaaataatcccgaaagcccgaataattatacacaggcaaggatttggggcgagaagtatttcggcaagaacttcaacagattagtaaaagttaagaccaaagttgaccccaataacttttttagaaatgaacaaagtatccctccactcccaccacatcatcat

SEQ ID NO: 348 - DNA, 1551 bp, Artificial Sequence
  Synthetic
aatcccagggagaactttcttaagtgtttcagtaaacatatcccaaataacgtggcgaatccgaaattagtatacacgcaacacgatcagctatatatgagcattctgaatagtaccattcaaaacttgcgctttacttcggacacaactccaaagcctttagtcatagttactccttcaaatgtttcccatattcaggctacaatcctctgctctaaaaaagttgggttgcaaatacgtactagatcaggaggccacgatgccgaaggtatgtcttatatctcccaagtgccattcgttgtcgtcgacttgaggaacatgcattctattaagattgatgtacactcccagaccgcatgggttgaagctggtgccacattaggtgaagtatactattggataaacgagaaaaatgaaaatttatcgtttcctggaggctattgtccaactgttggtgtcggtggtcatttctcaggcgggggctacggagcattgatgcgaaactacggactagcagctgataacattatagacgcccatctcgtgaatgtggatggtaaagttcttgatagaaagagcatgggtgaagatttgttttgggcgatcagaggcggtggaggggaaaactttggtattattgcggcttggaaaataaagctggtcgacgttccctcgaaagtcacaatcttttctgtaaagaaaaatatggaaatacatgggttggtcaagttattcaataaatggcaaaacattgcttataagtatgataaagacctcgttctgatgactcattttattacgaaaaatattaccgacaatcacggtaagaataaaactacagtgcacggttacttttcttcaattttccatggtggcgttgactctctagtagatttaatgaacaaaagtttccctgagttagggatcaagaaaacggattgtaaagaattttcttggatcgacacaaccatattctattcgggtgttgttaactttaataccgcaaactttaaaaaggaaattttgttagatcgctctgctggaaagaaaacagcatttagtatcaaacttgactatgtaaagaaaccgatacccgagactgccatggttaagatacttgagaagctatacgaagaggatgtgggagctggcatgtacgttctctacccttacggcggtataatggaagaaatttcagaatccgcaatcccattcccacacagagcaggtattatgtatgaactgtggtatactgcctcatgggagaaacaagaagataacgaaaaacacattaattgggtccgtagcgtctacaatttcactacaccatatgtatcccaaaacccgagattggcttacttgaattatagagacttggatctaggaaaaaccaatgaggccagcccgaataattatacacaggcaaggatttggggcgagaagtatttcggcaagaacttcaacagattagtaaaagttaagaccaaagttgaccccaataacttttttagaaatgaacaaagtatccctccactcccaccacatcatcat

SEQ ID NO: 349 - DNA, 1551 bp, Artificial Sequence
  Synthetic
aatcccagggagaactttcttaagtgtttcagtaaacatatcccaaataacgtggcgaatccgaaattagtatacacgcaacacgatcagctatatatgagcattctgaatagtaccattcaaaacttgcgctttatatcggacacaactccaaagcctttagtcatagttactccttcaaataattcccatattcaggctacaatcctctgctctaaaaaagttgggttgcaaatacgtactagatcaggaggccacgatgccgaaggtatgtcttatatctcccaagtgccattcgttgtcgtcgacttgaggaacatgcattctattaagattgatgtacactcccagaccgcatgggttgaagctggtgccacattaggtgaagtatactattggataaacgagaaaaatgaaaatttatcgtttcctggaggctattgtccaactgttggtgtcggtggtcatttctcaggcgggggctacggagcattgatgcgaaactacggactagcagctgataacattatagacgcccatctcgtgaatgtggatggtaaagttcttgatagaaagagcatgggtgaagatttgttttgggcgatcagaggcggtggaggggaaaactttggtattattgcggcttggaaaataaagctggtcgacgttccctcgaaagtaacaatcttttctgtaaagaaaaatatggaaatacatgggttggtcaagttattcaataaatggcaaaacattgcttataagtatgataaagacctcgttctgatgactcattttattacgaaaaatattaccgacaatcacggtaagaataaaactacagtgcacggttacttttcttcaattttccatggtggcgttgactctctagtagatttaatgaacaaaagtttccctgagttagggatcaagaaaacggattgtaaagaattttcttggatcgacacaaccatattctattcgggtgttgttaactttaataccgcaaactttaaaaaggaaattttgttagatcgctctgctggaaagaaaacagcatttagtatcaaacttgactatgtaaagaaaccgatacccgagactgccatggttaagatacttgagaagctatacgaagaggatgtgggagctggcatgtacgttctctacccttacggcggtataatggaagaaatttcagaatccgcaatcccattcccacacagagcaggtattatgtatgaactgtggtatactgcctcatgggagaaacaagaagataacgaaaaacacattaattgggtccgtagcgtctacaatttcactacaccatatgtatcccaaaacccgagattggcttacttgaattatagagacttggatctaggaaaaaccaatgaagccagcccgaataattatacacaggcaaggatttggggcgagaagtatttcggcaagaacttcaacagattagtaaaagttaagaccaaagttgaccccaataacttttttagaaatgaacaaagtatccctccactcccaccacatcatcat

SEQ ID NO: 350 - DNA, 1551 bp, Artificial Sequence
  Synthetic
aatccccaagagaactttcttaagtgtttcagtcagtatatcccaaataacccggcgaatccgaaattagtatacacgcaaaatgatcagctatattctagcattctgaatagtaccattcaaaacttgcgctttacatcggacacaactccaaagcctttagtcatagttactccttcaaatgtttcccatattcaggctacaatcctctgctctaaaaaagttgggttgcaaatacgtactagatcaggaggccacgatgccgaaggtatgtcttatatctcccaagtgccattcgttattgtcgacttgaggaacatgcattctattaagattgatgtacactcccagaccgcatgggttgaagctggtgccacattaggtgaagtatactattggataaacgagaaaaatgaaaatttatcgtttcctggaggctattgtccaactgttggtgtcggtggtcatttctcaggcgggggctacggagcattgatgcgaaactacggactagcagctgataacattatagacgcccatctcgtgaatgtggatggtaaagttcttgatagaaagagcatgggtgaagatttgttttgggcgatcagaggcggtggaggggaaaactttggtattattgcggcttggaaaataaagctggtcgcagttccctcgaaagtaacaatcttttctgtaaagaaaaatatggaaatacatgggttggtcaagttattcaataaatggcaaaacattgcttataagtatgataaagacctcttactgttcactcattttattacgaggaatattaccgacaatcacggtaagaataaaactacagtgcacggttacttttcttcaattttccatggtggcgttgactctctagtagatttaatgaacaaaagtttccctgagttagggatcaagaaaacggattgtaaagaactatcttggatcgacacaaccatattctattcgggtgttgttaactacaataccgcaaactttaaaaaggaaattttgttagatcgctctgctggaaagaaaacagcatttagtatcaaacttgactatgtaaagaaaccgatacccgagactgccatggttaagatacttgagaagctatacgaagaggatgtgggagtgggcatgtacgttctctacccttacggcggtataatggatgaaatttcagaatccgcaatcccattcccacacagagcaggtattatgtatgaactgtggtatactgcctcatgggagaaacaagaagataacgaaaaacacattaattgggtccgtagcgtctacaatttcactacaccatatgtatcccaaaacccgagattggcttacttgaattatagagacttggatctaggaaaaaataatcctgaaagcccgaataattatacacaggcaaggatttggggcgagaagtatttcggcaagaacttcaacagattagtaaaagttaagaccaaagttgaccccaataacttttttagaaatgaacaaagtatccctccactcccaccacatcatcat

SEQ ID NO: 351 - DNA, 1551 bp, Artificial Sequence
  Synthetic
aatccccaggagaactttcttaagtgtttcagtcaatatatcccaaataacccggcgaatccgaaattagtatacacgcaaaatgatcagctatatagcagcattctgaatagtaccattcaaaacttgcgctttacttcggacacaactccaaagcctttagtcatagttactccttcaaatgtgtcccatattcaggctacaatcctctgctctaaaaaagttgggttgcaaatacgtactagatcaggaggccacgatgccgaaggtatgtcttatatctcccaagtgccattcgttattgtcgacttgaggaacatgcattctattaagattgatgtagaatcccagaccgcatgggttgaagctggtgccacattaggtgaagtatactattggataaacgagaaaaatgaaaatttatcgtttcctggaggctattgtccaactgttggtgtcggtggtcatttctcaggcgggggctacggagcattgatgcgaaactacggactagcagctgataacattatagacgcccatctcgtgaatgtggatggtaaagttcttgatagaaagagcatgggtgaagatttgttttgggcgatcagaggcggtggaggggaaaactttggtattattgcggcttggaaaataaagctggtcgcagttccctcgaaagtaacaatcttttctgtaaagaaaaatatggaaatacatgggttggtcaagttattcaataaatggcaaaacattgcttataagtatgataaagacctcctgctgttcactcattttattacgaggaatattaccgacaatcacggtaagaataaaactacagtgcacggttacttttcttcaattttccatggtggcgttgactctctagtagatttaatgaacaaaagtttccctgagttagggatcaagaaagaagattgtaaagaattgtcttggatcgacacaaccatattcttttcgggtgttgttaactataataccgcaaactttaaaaaggaaattttgttagatcgctctgctggaaagaaaacagcatttagtatcaaacttgactatgtaaagaaaccgatacccgagactgccatggttaagatacttgagaagctatacgaagaggatgtgggagtgggcatgtacgttctctacccttacggcggtataatggatgaaatttcagaatccgcaatcccattcccacacagagcaggtattatgtatgaactgtggtatactgcctcatgggagaaacaagaagataacgaaaaacacattaattgggtccgtagcgtctacaatttcactacaccatatgtatccaaaaacccgagattggcttacttgaattatagagacttggatctaggaaaaaacaatcctgagagcccgaataattatacacaggcaaggatttggggcgagaagtatttcggcaagaacttcaacagattagtaaaagttaagaccaaagttgaccccaataacttttttagaaatgaacaaagtatccctccactcccaccacatcatcat

SEQ ID NO: 352 - DNA, 1551 bp, Artificial Sequence
  Synthetic
aatccccaggagaactttcttaagtgtttcagtcaatacatcccaaataaccctgcgaatccgaaattaatttacacgcaaaatgattctctatatagcagcattctgaatagtaccattcaaaacttgcgctttacttcggacacaactccaaagcctttagtcatagttactccttcaaatgtatcccatattcaggctacaatcctctgctctaaaaaagttgggttgcaaatacgtactagatcaggaggccacgatgccgaaggtatgtcttatatctcccaagtgccattcgttatagtcgacttgaggaacatgcattctattaagattgatgtacactcccagaccgcatgggttgaagctggtgccacattaggtgaagtatactattggataaacgagaaaaatgaaaatttatcgtttcctggaggctattgtccaactgttggtgtcggtggtcatttctcaggcgggggctacggagcattgatgcgaaactacggactagcagctgataacattatagacgcccatctcgtgaatgtggatggtaaagttcttgatagaaagagcatgggtgaagatttgttttgggcgatcagaggcggtggaggggaaaactttggtattattgcggcttggaaaataaagctggtcgcagttccctcgaaagttacaatcttttctgtaaagaaaaatatggaaatacatgggttggtcaagttattcaataaatggcaaaacattgcttataagtatgataaagacctcttgctgttcactcattttattacgaggaatattaccgacaatcacggtaagaataaaactacagtgcacggttacttttcttcaattttccatggtggcgttgactctctagtagatttaatgaacaaaagtttccctgagttagggatcaagaaagaagattgtaaagaactgtcttggatcgacacaaccatattctattcgggtgttgttaactataataccgcaaactttaaaaaggaaattttgttagatcgctctgctggaaagaaaacagcatttagtatcaaacttgactatgtaaagaaaccgatacccgagactgccatggttaagatacttgagaagctatacgaagaggatgtgggagtaggcatgtacgttctctacccttacggcggtataatggatgaaatttcagaatccgcaatcccattcccacacagagcaggtattatgtatgaactgtggtatactgcctcatgggagaaacaagaagataacgaaaaacacattaattgggtccgtagcgtctacaatttcactacaccatatgtatccaaaaacccgagattggcttacttgaattatagagacttggatctaggaaaaaataatccggaaagcccgaataattatacacaggcaaggatttggggcgagaagtatttcggcaagaacttcaacagattagtaaaagttaagaccaaagttgaccccaataacttttttagaaatgaacaaagtatccctccactcccaccacatcatcat

SEQ ID NO: 353 - DNA, 1551 bp, Artificial Sequence
  Synthetic
aatccccaggagaactttcttaagtgtttcagtcaatatatcccaaataacgtggcgaatccgaaattagtatacacgcaaaacgatagcctatattccagcattctgaatagtaccattcaaaacttgcgctttacatcggacacaactccaaagcctttagtcatagttactccttcaaatgtttcccatattcaggctacaatcctctgctctaaaaaagttgggttgcaaatacgtactagatcaggaggccacgatgccgaaggtatgtcttatatctcccaagtgccattcgttattgtcgacttgaggaacatgcattctattaagattgatgtacactcccagaccgcatgggttgaagctggtgccacattaggtgaagtatactattggataaacgagaaaaatgaaaatttatcgtttcctggaggctattgtccaactgttggtgtcggtggtcatttctcaggcgggggctacggagcattgatgcgaaactacggactagcagctgataacattatagacgcccatctcgtgaatgtggatggtaaagttcttgatagaaagagcatgggtgaagatttgttttgggcgatcagaggcggtggaggggaaaactttggtattattgcggcttggaaaataaagctggtcgcagttccctcgaaagtaacaatcttttctgtaaagaaaaatatggaaatacatgggttggtcaagttattcaataaatggcaaaacattgcttataagtatgataaagacctcttactgttcactcattttattacgaggaatattaccgacaatcacggtaagaataaaactacagtgcacggttacttttcttcaattttccatggtggcgttgactctctagtagatttaatgaacaaaagtttccctgagttagggatcaagaaagaagattgtaaagaattatcttggatcgacacaaccatattctattcgggtgttgttaactacaataccgcaaactttaaaaaggaaattttgttagatcgctctgctggaaagaaaacagcatttagtatcaaacttgactatgtaaagaaaccgatacccgagactgccatggttaagatacttgagaagctatacgaagaggatgtgggagtcggcatgtacgttctctacccttacggcggtataatggatgaaatttcagaatccgcaatcccattcccacacagagcaggtattatgtatgaactgtggtatactgcctcatgggagaaacaagaagataacgaaaaacacattaattgggtccgtagcgtctacaatttcactacaccatatgtatccaaaaacccgagattggcttacttgaattatagagacttggatctaggaaaaaataatccagaaagcccgaataattatacacaggcaaggatttggggcgagaagtatttcggcaagaacttcaacagattagtaaaagttaagaccaaagttgaccccaataacttttttagaaatgaacaaagtatccctccactcccaccacatcatcat

SEQ ID NO: 354 - DNA, 1551 bp, Artificial Sequence
  Synthetic
aatccccaagagaactttcttaagtgtttcagtcagtacatcccaaataacgtggcgaatccgaaattagtatacacgcaacacgatcagctatatagcagcattctgaatagtaccattcaaaacttgcgctttacttcggacacaactccaaagcctttagtcatagttactccttcaaatgtttcccatattcaggctacaatcctctgctctaaaaaagttgggttgcaaatacgtactagatcaggaggccacgatgccgaaggtatgtcttatatctcccaagtgccattcgttattgtcgacttgaggaacatgcattctattaagattgatgtacactcccagaccgcatgggttgaagctggtgccacattaggtgaagtatactattggataaacgagaaaaatgaaaatttatcgtttcctggaggctattgtccaactgttggtgtcggtggtcatttctcaggcgggggctacggagcattgatgcgaaactacggactagcagctgataacattatagacgcccatctcgtgaatgtggatggtaaagttcttgatagaaagagcatgggtgaagatttgttttgggcgatcagaggcggtggaggggaaaactttggtattattgcggcttggaaaataaagctggtcgcagttccctcgaaagtaacaatcttttctgtaaagaaaaatatggaaatacatgggttggtcaagttattcaataaatggcaaaacattgcttataagtatgataaagacctcttactgtttactcattttattacgaggaatattaccgacaatcacggtaagaataaaactacagtgcacggttacttttcttcaattttccatggtggcgttgactctctagtagatttaatgaacaaaagtttccctgagttagggatcaagaaagaggattgtaaagaattgtcttggatcgacacaaccatattctattcgggtgttgttaactacaataccgcaaactttaaaaaggaaattttgttagatcgctctgctggaaagaaaacagcatttagtatcaaacttgactatgtaaagaaaccgatacccgagactgccatggttaagatacttgagaagctatacgaagaggatgtgggagtgggcatgtacgttctctacccttacggcggtataatggatgaaatttcagaatccgcaatcccattcccacacagagcaggtattatgtatgaactgtggtatactgcctcatgggagaaacaagaagataacgaaaaacacattaattgggtccgtagcgtctacaatttcactacaccatatgtatccaagaacccgagattggcttacttgaattatagagacttggatctaggaaaaaataatcccgagagcccgaataattatacacaggcaaggatttggggcgagaagtatttcggcaagaacttcaacagattagtaaaagttaagaccaaagttgaccccaataacttttttagaaatgaacaaagtatccctccactcccaccacatcatcat

SEQ ID NO: 355 - DNA, 1551 bp, Artificial Sequence
  Synthetic
aatccccaagagaactttcttaagtgtttcagtcagtatatcccaaataacgtggcgaatccgaaattagtatacacgcaacacgattccctatattcaagcattctgaatagtaccattcaaaacttgcgctttacttcggacacaactccaaagcctttagtcatagttactccttcaaatgtttcccatattcaggctacaatcctctgctctaaaaaagttgggttgcaaatacgtactagatcaggaggccacgatgccgaaggtatgtcttatatctcccaagtgccattcgttattgtcgacttgaggaacatgcattctattaagattgatgtagaatcccagaccgcatgggttgaagctggtgccacattaggtgaagtatactattggataaacgagaaaaatgaaaatttatcgtttcctggaggctattgtccaactgttggtgtcggtggtcatttctcaggcgggggctacggagcattgatgcgaaactacggactagcagctgataacattatagacgcccatctcgtgaatgtggatggtaaagttcttgatagaaagagcatgggtgaagatttgttttgggcgatcagaggcggtggaggggaaaactttggtattattgcggcttggaaaataaagctggtcgcagttccctcgaaagttacaatcttttctgtaaagaaaaatatggaaatacatgggttggtcaagttattcaataaatggcaaaacattgcttataagtatgataaagacctcctgctgttcactcattttattacgcggaatattaccgacaatcacggtaagaataaaactacagtgcacggttacttttcttcaattttccatggtggcgttgactctctagtagatttaatgaacaaaagtttccctgagttagggatcaagaaagaggattgtaaagaactatcttggatcgacacaaccatattctattcgggtgttgttaactacaataccgcaaactttaaaaaggaaattttgttagatcgctctgctggaaagaaaacagcatttagtatcaaacttgactatgtaaagaaaccgatacccgagactgccatggttaagatacttgagaagctatacgaagaggatgtgggagttggcatgtacgttctctacccttacggcggtataatggatgaaatttcagaatccgcaatcccattcccacacagagcaggtattatgtatgaactgtggtatactgcctcatgggagaaacaagaagataacgaaaaacacattaattgggtccgtagcgtctacaatttcactacaccatatgtatccaaaaacccgagattggcttacttgaattatagagacttggatctaggaaaaaataatcccgagagcccgaataattatacacaggcaaggatttggggcgagaagtatttcggcaagaacttcaacagattagtaaaagttaagaccaaagttgaccccaataacttttttagaaatgaacaaagtatccctccactcccaccacatcatcat

SEQ ID NO: 356 - DNA, 1551 bp, Artificial Sequence
  Synthetic
aatccccaggagaactttcttaagtgtttcagtcaatatatcccaaataacccggcgaatccgaaattagtatacacgcaaaatgattcactatattctagcattctgaatagtaccattcaaaacttgcgctttacttcggacacaactccaaagcctttagtcatagttactccttcaaatgtgtcccatattcaggctacaatcctctgctctaaaaaagttgggttgcaaatacgtactagatcaggaggccacgatgccgaaggtatgtcttatatctcccaagtgccattcgttattgtcgacttgaggaacatgcattctattaagattgatgtacactcccagaccgcatgggttgaagctggtgccacattaggtgaactttactattggataaacgagaaaaatgaaaatttatcgtttcctggaggctattgtccaactgttggtgtcggtggtcatttctcaggcgggggctacggagcattgatgcgaaactacggactagcagctgataacattatagacgcccatctcgtgaatgtggatggtaaagttcttgatagaaagagcatgggtgaagatttgttttgggcgatcagaggcggtggaggggaaaactttggtattattgcggcttggaaaataaagctggtcgcagttccctcgaaagtaacaatcttttctgtaaagaaaaatatggaaatacatgggttggtcaagttattcaataaatggcaaaacattgcttataagtatgataaagacctcttactgttcactcattttattacgaggaatattaccgacaatcacggtaagaataaaactacagtgcacggttacttttcttcaattttccatggtggcgttgactctctagtagatttaatgaacaaaagtttccctgagttagggatcaagaaagaagattgtaaagaactatcttggatcgacacaaccatattctattcgggtgttgttaactacaataccgcaaactttaaaaaggaaattttgttagatcgctctgctggaaagaaaacagcatttagtatcaaacttgactatgtaaagaaaccgatacccgagactgccatggttaagatacttgagaagctatacgaagaggatgtgggagtgggcatgtacgttctctacccttacggcggtataatggatgaaatttcagaatccgcaatcccattcccacacagagcaggtattatgtatgaactgtggtatactgcctcatgggagaaacaagaagataacgaaaaacacattaattgggtccgtagcgtctacaatttcactacaccatatgtatccaagaacccgagattggcttacttgaattatagagacttggatctaggaaaaaataatcccgagagcccgaataattatacacaggcaaggatttggggcgagaagtatttcggcaagaacttcaacagattagtaaaagttaagaccaaagttgaccccaataacttttttagaaatgaacaaagtatccctccactcccaccacatcatcat

SEQ ID NO: 357 - DNA, 1551 bp, Artificial Sequence
  Synthetic
aatccccaggagaactttcttaagtgtttcagtaaacatatcccaaataacgtggcgaatccgaaattagtatacacgcaacacgatcagctatattccagcattctgaatagtaccattcaaaacttgcgctttacttcggacacaactccaaagcctttagtcatagttactccttcaaatgtttcccatattcaggctacaatcctctgctctaaaaaagttgggttgcaaatacgtactagatcaggaggccacgatgccgaaggtatgtcttatatctcccaagtgccattcgttgtcgtcgacttgaggaacatgcattctattaagattgatgtacactcccagaccgcatgggttgaagctggtgccacattaggtgaagtatactattggataaacgagaaaaatgaaaatttatcgtttcctggaggctattgtccaactgttggtgtcggtggtcatttctcaggcgggggctacggagcattgatgcgaaactacggactagcagctgataacattatagacgcccatctcgtgaatgtggatggtaaagttcttgatagaaagagcatgggtgaagatttgttttgggcgatcagaggcggtggaggggaaaactttggtattattgcggcttggaaaataaagctggtccccgttccctcgaaagtaacaatcttttctgtaaagaaaaatatggaaatacatgggttggtcaagttattcaataaatggcaaaacattgcttataagtatgataaagacctcgttctgatgactcattttattacgaaaaatattaccgacaatcacggtaagaataaaactacagtgcacggttacttttcttcaattttccatggtggcgttgactctctagtagatttaatgaacaaaagtttccctgagttagggatcaagaaaacggattgtaaagaattttcttggatcgacacaaccatattctattcgggtgttgttaactttaataccgcaaactttaaaaaggaaattttgttagatcgctctgctggaaagaaaacagcatttagtatcaaacttgactatgtaaagaaaccgatacccgagactgccatggttaagatacttgagaagctatacgaagaggatgtgggagctggcatgtacgttctctacccttacggcggtataatggatgaaatttcagaatccgcaatcccattcccacacagagcaggtattatgtatgaactgtggtatactgcctcatgggagaaacaagaagataacgaaaaacacattaattgggtccgtagcgtctacaatttcactacaccatatgtatccaagaacccgagattggcttacttgaattatagagacttggatctaggaaaaaacaatgaagccagcccgaataattatacacaggcaaggatttggggcgagaagtatttcggcaagaacttcaacagattagtaaaagttaagaccaaagttgaccccaataacttttttagaaatgaacaaagtatccctccactcccaccacatcatcat

SEQ ID NO: 358 - DNA, 1551 bp, Artificial Sequence
  Synthetic
aatccccaagagaactttcttaagtgtttcagtcagtatatcccaaataacgtggcgaatccgaaattagtatacacgcaacacgatcagctatatatgagcattctgaatagtaccattcaaaacttgcgctttacttcggacacaactccaaagcctttagtcatagttactccttcaaatgtttcccatattcaggctacaatcctctgctctaaaaaagttgggttgcaaatacgtactagatcaggaggccacgatgccgaaggtatgtcttatatctcccaagtgccattcgttattgtcgacttgaggaacatgcattctattaagattgatgtagaatcccagaccgcatgggttgaagctggtgccacattaggtgaagtatactattggataaacgagaaaaatgaaaatttatcgtttcctggaggctattgtccaactgttggtgtcggtggtcatttctcaggcgggggctacggagcattgatgcgaaactacggactagcagctgataacattatagacgcccatctcgtgaatgtggatggtaaagttcttgatagaaagagcatgggtgaagatttgttttgggcgatcagaggcggtggaggggaaaactttggtattattgcggcttggaaaataaagctggtcgcagttccctcgaaagtaacaatcttttctgtaaagaaaaatatggaaatacatgggttggtcaagttattcaataaatggcaaaacattgcttataagtatgataaagacctcttactgtttactcattttattacgaggaatattaccgacaatcacggtaagaataaaactacagtgcacggttacttttcttcaattttccatggtggcgttgactctctagtagatttaatgaacaaaagtttccctgagttagggatcaagaaaacggattgtaaagaactttcttggatcgacacaaccatattctattcgggtgttgttaactacaataccgcaaactttaaaaaggaaattttgttagatcgctctgctggaaagaaaacagcatttagtatcaaacttgactatgtaaagaaaccgatacccgagactgccatggttaagatacttgagaagctatacgaagaggatgtgggagtaggcatgtacgttctctacccttacggcggtataatggatgaaatttcagaatccgcaatcccattcccacacagagcaggtattatgtatgaactgtggtatactgcctcatgggagaaacaagaagataacgaaaaacacattaattgggtccgtagcgtctacaatttcactacaccatatgtatcccaaaacccgagattggcttacttgaattatagagacttggatctaggaaaaaataatcccgaaagcccgaataattatacacaggcaaggatttggggcgagaagtatttcggcaagaacttcaacagattagtaaaagttaagaccaaagttgaccccaataacttttttagaaatgaacaaagtatccctccactcccaccacatcatcat

SEQ ID NO: 359 - DNA, 1551 bp, Artificial Sequence
  Synthetic
aatcccagggagaactttcttaagtgtttcagtaaacatatcccaaataacgtggcgaatccgaaattagtatacacgcaaaatgatcagctatatatgagcattctgaatagtaccattcaaaacttgcgctttacttcggacacaactccaaagcctttagtcatagttactccttcaaatgtttcccatattcaggctacaatcctctgctctaaaaaagttgggttgcaaatacgtactagatcaggaggccacgatgccgaaggtatgtcttatatctcccaagtgccattcgttgtcgtcgacttgaggaacatgcattctattaagattgatgtacactcccagaccgcatgggttgaagctggtgccacattaggtgaagtatactattggataaacgagaaaaatgaaaatttatcgtttcctggaggctattgtccaactgttggtgtcggtggtcatttctcaggcgggggctacggagcattgatgcgaaactacggactagcagctgataacattatagacgcccatctcgtgaatgtggatggtaaagttcttgatagaaagagcatgggtgaagatttgttttgggcgatcagaggcggtggaggggaaaactttggtattattgcggcttggaaaataaagctggtcgacgttccctcgaaagttacaatcttttctgtaaagaaaaatatggaaatacatgggttggtcaagttattcaataaatggcaaaacattgcttataagtatgataaagacctcgttctgatgactcattttattacgaaaaatattaccgacaatcacggtaagaataaaactacagtgcacggttacttttcttcaattttccatggtggcgttgactctctagtagatttaatgaacaaaagtttccctgagttagggatcaagaaaacggattgtaaagaattttcttggatcgacacaaccatattctattcgggtgttgttaactttaataccgcaaactttaaaaaggaaattttgttagatcgctctgctggaaagaaaacagcatttagtatcaaacttgactatgtaaagaaaccgatacccgagactgccatggttaagatacttgagaagctatacgaagaggatgtgggagctggcatgtacgttctctacccttacggcggtataatggaagaaatttcagaatccgcaatcccattcccacacagagcaggtattatgtatgaactgtggtatactgcctcatgggagaaacaagaagataacgaaaaacacattaattgggtccgtagcgtctacaatttcactacaccatatgtatcccaaaacccgagattggcttacttgaattatagagacttggatctaggaaaaaataatgaagccagcccgaataattatacacaggcaaggatttggggcgagaagtatttcggcaagaacttcaacagattagtaaaagttaagaccaaagttgaccccaataacttttttagaaatgaacaaagtatccctccactcccaccacatcatcat

SEQ ID NO: 360 - DNA, 1551 bp, Artificial Sequence
  Synthetic
aatccccaggagaactttcttaagtgtttcagtaaacatatcccaaataaccctgcgaatccgaaattagtatacacgcaacacgatcagctatatatgagcattctgaatagtaccattcaaaacttgcgctttacttcggacacaactccaaagcctttagtcatagttactccttcaaatgtgtcccatattcaggctacaatcctctgctctaaaaaagttgggttgcaaatacgtactagatcaggaggccacgatgccgaaggtatgtcttatatctcccaagtgccattcgttgtcgtcgacttgaggaacatgcattctattaagattgatgtacactcccagaccgcatgggttgaagctggtgccacattaggtgaagtatactattggataaacgagaaaaatgaaaatttatcgtttcctggaggctattgtccaactgttggtgtcggtggtcatttctcaggcgggggctacggagcattgatgcgaaactacggactagcagctgataacattatagacgcccatctcgtgaatgtggatggtaaagttcttgatagaaagagcatgggtgaagatttgttttgggcgatcagaggcggtggaggggaaaactttggtattattgcggcttggaaaataaagctggtcgatgttccctcgaaagtaacaatcttttctgtaaagaaaaatatggaaatacatgggttggtcaagttattcaataaatggcaaaacattgcttataagtatgataaagacctcgttctgatgactcattttattacgaaaaatattaccgacaatcacggtaagaataaaactacagtgcacggttacttttcttcaattttccatggtggcgttgactctctagtagatttaatgaacaaaagtttccctgagttagggatcaagaaaacggattgtaaagaattttcttggatcgacacaaccatattctattcgggtgttgttaactttaataccgcaaactttaaaaaggaaattttgttagatcgctctgctggaaagaaaacagcatttagtatcaaacttgactatgtaaagaaaccgatacccgagactgccatggttaagatacttgagaagctatacgaagaggatgtgggagctggcatgtacgttctctacccttacggcggtataatggatgaaatttcagaatccgcaatcccattcccacacagagcaggtattatgtatgaactgtggtatactgcctcatgggagaaacaagaagataacgaaaaacacattaattgggtccgtagcgtctacaatttcactacaccatatgtatccaaaaacccgagattggcttacttgaattatagagacttggatctaggaaaaaataatgaggaaagcccgaataattatacacaggcaaggatttggggcgagaagtatttcggcaagaacttcaacagattagtaaaagttaagaccaaagttgaccccaataacttttttagaaatgaacaaagtatccctccactcccaccacatcatcat

SEQ ID NO: 361 - DNA, 1551 bp, Artificial Sequence
  Synthetic
aatccccaagagaactttcttaagtgtttcagtcagtatatcccaaataacccggcgaatccgaaattagtatacacgcaaaatgattctctatattccagcattctgaatagtaccattcaaaacttgcgctttacatcggacacaactccaaagcctttagtcatagttactccttcaaatgtgtcccatattcaggctacaatcctctgctctaaaaaagttgggttgcaaatacgtactagatcaggaggccacgatgccgaaggtatgtcttatatctcccaagtgccattcgttattgtcgacttgaggaacatgcattctattaagattgatgtacactcccagaccgcatgggttgaagctggtgccacattaggtgaagtatactattggataaacgagaaaaatgaaaatttatcgtttcctggaggctattgtccaactgttggtgtcggtggtcatttctcaggcgggggctacggagcattgatgcgaaactacggactagcagctgataacattatagacgcccatctcgtgaatgtggatggtaaagttcttgatagaaagagcatgggtgaagatttgttttgggcgatcagaggcggtggaggggaaaactttggtattattgcggcttggaaaataaagctggtcgcagttccctcgaaagtaacaatcttttctgtaaagaaaaatatggaaatacatgggttggtcaagttattcaataaatggcaaaacattgcttataagtatgataaagacctccttctgttcactcattttattacgaggaatattaccgacaatcacggtaagaataaaactacagtgcacggttacttttcttcaattttccatggtggcgttgactctctagtagatttaatgaacaaaagtttccctgagttagggatcaagaaagaggattgtaaagaattatcttggatcgacacaaccatattctattcgggtgttgttaactacaataccgcaaactttaaaaaggaaattttgttagatcgctctgctggaaagaaaacagcatttagtatcaaacttgactatgtaaagaaaccgatacccgagactgccatggttaagatacttgagaagctatacgaagaggatgtgggagtcggcatgtacgttctctacccttacggcggtataatggatgaaatttcagaatccgcaatcccattcccacacagagcaggtattatgtatgaactgtggtatatcgcctcatgggagaaacaagaagataacgaaaaacacattaattgggtccgtagcgtctacaatttcactacaccatatgtatccaagaacccgagattggcttacttgaattatagagacttggatctaggaaaaaataatcctgagagcccgaataattatacacaggcaaggatttggggcgagaagtatttcggcaagaacttcaacagattagtaaaagttaagaccaaagttgaccccaataacttttttagaaatgaacaaagtatccctccactcccaccacatcatcat

SEQ ID NO: 362 - DNA, 1551 bp, Artificial Sequence
  Synthetic
aatcccagggagaactttcttaagtgtttcagtaaacatatcccaaataaccctgcgaatccgaaattagtatacacgcaacacgatcagctatatatgagcattctgaatagtaccattcaaaacttgcgctttacatcggacacaactccaaagcctttagtcatagttactccttcaaatgtttcccatattcaggctacaatcctctgctctaaaaaagttgggttgcaaatacgtactagatcaggaggccacgatgccgaaggtatgtcttatatctcccaagtgccattcgttgtcgtcgacttgaggaacatgcattctattaagattgatgtacactcccagaccgcatgggttgaagctggtgccacattaggtgaagtatactattggataaacgagaaaaatgaaaatttatcgtttcctggaggctattgtccaactgttggtgtcggtggtcatttctcaggcgggggctacggagcattgatgcgaaactacggactagcagctgataacattatagacgcccatctcgtgaatgtggatggtaaagttcttgatagaaagagcatgggtgaagatttgttttgggcgatcagaggcggtggaggggaaaactttggtattattgcggcttggaaaataaagctggtcgatgttccctcgaaagtaacaatcttttctgtaaagaaaaatatggaaatacatgggttggtcaagttattcaataaatggcaaaacattgcttataagtatgataaagacctcgttctgatgactcattttattacgaaaaatattaccgacaatcacggtaagaataaaactacagtgcacggttacttttcttcaattttccatggtggcgttgactctctagtagatttaatgaacaaaagtttccctgagttagggatcaagaaaacggattgtaaagaattttcttggatcgacacaaccatattctattcgggtgttgttaactttaataccgcaaactttaaaaaggaaattttgttagatcgctctgctggaaagaaaacagcatttagtatcaaacttgactatgtaaagaaaccgatacccgagactgccatggttaagatacttgagaagctatacgaagaggatgtgggagctggcatgtacgttctctacccttacggcggtataatggaagaaatttcagaatccgcaatcccattcccacacagagcaggtattatgtatgaactgtggtatactgcctcatgggagaaacaagaagataacgaaaaacacattaattgggtccgtagcgtctacaatttcactacaccatatgtatcccaaaacccgagattggcttacttgaattatagagacttggatctaggaaaaaccaatcatgccagcccgaataattatacacaggcaaggatttggggcgagaagtatttcggcaagaacttcaacagattagtaaaagttaagaccaaagttgaccccaataacttttttagaaatgaacaaagtatccctccactcccaccacatcatcat

SEQ ID NO: 363 - DNA, 1551 bp, Artificial Sequence
  Synthetic
aatcccagggagaactttcttaagtgtttcagtaaacatatcccaaataacgtggcgaatccgaaattagtatacacgcaaaacgatcagctatattcgagcattctgaatagtaccattcaaaacttgcgctttacatcggacacaactccaaagcctttagtcatagttactccttcaaatgtttcccatattcaggctacaatcctctgctctaaaaaagttgggttgcaaatacgtactagatcaggaggccacgatgccgaaggtatgtcttatatctcccaagtgccattcgttgtcgtcgacttgaggaacatgcattctattaagattgatgtacactcccagaccgcatgggttgaagctggtgccacattaggtgaagtatactattggataaacgagaaaaatgaaaatttatcgtttcctggaggctattgtccaactgttggtgtcggtggtcatttctcaggcgggggctacggagcattgatgcgaaactacggactagcagctgataacattatagacgcccatctcgtgaatgtggatggtaaagttcttgatagaaagagcatgggtgaagatttgttttgggcgatcagaggcggtggaggggaaaactttggtattattgcggcttggaaaataaagctggtccccgttccctcgaaagtgacaatcttttctgtaaagaaaaatatggaaatacatgggttggtcaagttattcaataaatggcaaaacattgcttataagtatgataaagacctcgttctgatgactcattttattacgaaaaatattaccgacaatcacggtaagaataaaactacagtgcacggttacttttcttcaattttccatggtggcgttgactctctagtagatttaatgaacaaaagtttccctgagttagggatcaagaaaacggattgtaaagaattttcttggatcgacacaaccatattctattcgggtgttgttaactttaataccgcaaactttaaaaaggaaattttgttagatcgctctgctggaaagaaaacagcatttagtatcaaacttgactatgtaaagaaaccgatacccgagactgccatggttaagatacttgagaagctatacgaagaggatgtgggagctggcatgtacgttctctacccttacggcggtataatggaagaaatttcagaatccgcaatcccattcccacacagagcaggtattatgtatgaactgtggtatactgcctcatgggagaaacaagaagataacgaaaaacacattaattgggtccgtagcgtctacaatttcactacaccatatgtatcccaaaacccgagattggcttacttgaattatagagacttggatctaggaaaaaataatgaggccagcccgaataattatacacaggcaaggatttggggcgagaagtatttcggcaagaacttcaacagattagtaaaagttaagaccaaagttgaccccaataacttttttagaaatgaacaaagtatccctccactcccaccacatcatcat

SEQ ID NO: 364 - DNA, 1548 bp, Artificial Sequence
  Synthetic
aatccaagagaaaatttcttgaagtgtttttctcagtatatcccgaataatgcgacgaaccttaacttagtatacactcagaacaaccctctatatatgagcgttctaaattctacaatccaaaacctaagatttacgtccgacacgactccgaaacccctagttatagtgacaccgtcacatgttagccatatacaggcaaccatactatgttccaaaaaagttgggttacaaatacgtacccgtagcgggggacacgacagtgaggggatgagttatattagtcaggtgcctttcgtcatagtggatttaagaaatatgaggtcaattaaaatcgacgttcactcacaaactgcctgggttgaggcgggggccacattgggtgaagtatattactgggtcaatgagaagaacgagaatctttcactagcagccggttattgtcccacagtctgcgccggcggtcactttggcggcggcggatacggtcccttaatgagaaattacgggcttgccgcagacaatatcatagatgctcacttagttaatgttaacggaaaagtgttagaccgtaaaagcatgggggaggatctgttttgggcgcttagagggggaggggcagaatcatttggaataatagtggcatggaaaatcaggcttgtggctgttccaaagagtaccatgttctcagtaaagaaaataatggagatccatgagctagttaaacttgtgaataaatggcaaaacatagcctataaatatgataaggacttgctgcttatgactcatttcataaccagaaacattacggataaccaagggaagaacaaaacagccatccatacctactttagctccgttttcttgggtggtgtagacagcttagttgacctgatgaacaagagttttccggaactaggtatcaagaagacagattgtagagaaatgtcctggattgataccataatcttttacagcggagtcgtcaattatgacactgacaacttcaacaaggaaattttattagataggagtgcgggtcaaaatggggccttcaagatcaaactagactacgttaaaaaacccattcctgaaagtgtttttgttcagattctggagaagctgtatgaagaagatattggcgcggggatgtacgctctttatccgtacggcggcataatggatgagattagtgaaagcgccatccctttcccccacagagctggtatcctgtacgagttgtggtatatctgctcctgggagaaacaggaggataacgaaaagcacttaaattggattaggaatatctacaatttcatgacgccctacgtttccaagaaccccaggttggcctatttgaactacagggatcttgatattggaatcaacgaccccaaaaacccaaacaactacacccaggcaaggatttggggagagaagtacttcgggaagaacttcgacaggctagttaaggtgaaaacgctagttgatccaaataattttttcagaaacgaacagagtatccctcccttaccgcgtcataggcac

SEQ ID NO: 365 - DNA, 1548 bp, Artificial Sequence
  Synthetic
aatccaagagaaaatttcttgaagtgtttttctcagtatatcccgaataatgcgacgaaccttaacttagtatacactcagaacaaccctctatatatgagcgttctaaattctacaatccaaaacctaagatttacgtccgacacgactccgaaacccctagttatagtgacaccgtcacatgttagccatatacaggccaccatactatgttccaaaaaagttgggttacaaatacgtacccgtagcgggggacacgacagtgaggggatgagttatattagtcaggtgcctttcgtcatagtggatttaagaaatatgaggtcaattaaaatcgacgttcactcacaaactgcctgggttgaggcgggggccacattgggtgaagtatattactgggtcaatgagaagaacgagaatctttcactagcagccggttattgtcccacagtctgcgccggcggtcactttggcggcggcggatacggtcccttaatgagaaattacgggcttgccgcagacaatatcatagatgctcacttagttaatgttaacggaaaagtgttagaccgtaaaagcatgggggaggatctgttttgggcgcttagagggggaggggcagaatcatttggaataatagtggcatggaaaatcaggcttgtggctgttccaaagagtaccatgttctcagtaaagaaaataatggagatccatgagctagttaaacttgtgaataaatggcaaaacatagcctataaatatgataaggacttgctgcttatgactcatttcataaccagaaacattacggataaccaagggaagaacaaaacagccatccatacctactttagctccgttttcttgggtggtgtagacagcttagttgacctgatgaacaagagttttccggaactaggtatcaagaaggaagattgtagacaaatgtcctggattgataccataatcttttacagcggagtcgtcaattatgacactgacaacttcaacaaggaaattttattagataggagtgcgggtcaaaatggggccttcaagatcaaactagactacgttaaaaaacccattcctgaaagtgtttttgttcagattctggagaagctgtatgaagaagatattggcgcggggatgtacgctctttatccgtacggcggcataatggatgagattagtgaaagcgccatccctttcccccacagagctggtatcctgtacgagttgtggtatatctgctcctgggagaaacaggaggataacgaaaagcacttaaattggattaggaatatctacaatttcatgacgccctacgtttccaagaaccccaggttggcctatttgaactacagggatcttgatattggaatcaacgaccccaaaaacccaaacaactacacccaggcaaggatttggggagagaagtacttcgggaagaacttcgacaggctagttaaggtgaaaacgctagttgatccaaataattttttcagaaacgaacagagtatccctcccttaccgcgtcataggcac

SEQ ID NO: 366 - DNA, 1548 bp, Artificial Sequence
  Synthetic
aatccaagagaaaatttcttgaagtgtttttctcagtatatcccgaataatgcgacgaaccttaagttagtatacactcagaacaaccctctatatatgagcgttctaaattctacaatccaaaacctaagatttacgtccgacacgactccgaaacccctagttatagtgacaccgtcacatgttagccatatacaggctaccatactatgttccaaaaaagttgggttacaaatacgtacccgtagcgggggacacgacgccgaggggatgagttatattagtcaggtgcctttcgtcatagtggatttaagaaatatgaggtcaattaaaatcgacgttcactcacaaactgcctgggttgaggcgggggccacattgggtgaagtatattactgggtcaatgagaagaacgagaatctttcactagcagccggttattgtcccacagtctgcgccggcggtcactttggcggcggcggatacggtcccttaatgagaaattacgggcttgccgcagacaatatcatagatgctcacttagttaatgttcatggaaaagtgttagaccgtaaaagcatgggggaggatctgttttgggcgcttagagggggaggggcagaatcatttggaataatagtggcatggaaaatcaggcttgtggctgttccaaagagtaccatgttctcagtaaagaaaataatggagatccatgagctagttaaacttgtgaataaatggcaaaacatagcctataaatatgataaggacttgctgcttatgactcatttcataaccagaaacattacggataaccaagggaagaacaaaacagccatccatacctactttagctccgttttcttgggtggtgtagacagcttagttgacctgatgaacaagagttttccggaactaggtatcaagaaggaagattgtagacaactttcctggattgataccataatcttttacagcggagtcgtcaattatgacactgacaacttcaacaaggaaattttattagataggagtgcgggtcaaaatggggccttcaagatcaaactagactacgttaaaaaacccattcctgaaagtgtttttgttcagattctggagaagctgtatgaagaagatattggcgcggggatgtacgctctttatccgtacggcggcataatggatgagattagtgaaagcgccatccctttcccccacagagctggtatcctgtacgagttgtggtatatctgctcctgggagaaacaggaggataacgaaaagcacttaaattggattaggaatatctacaatttcatgacgccctacgtttccaagaaccccaggttggcctatttgaactacagggatcttgatattggaatcaacgaccccaaaaacccaaacaactacacccaggcaaggatttggggagagaagtacttcgggaagaacttcgacaggctagttaaggtgaaaacgctagttgatccaaataattttttcagaaacgaacagagtatccctcccttaccgcgtcataggcac

SEQ ID NO: 367 - DNA, 1548 bp, Artificial Sequence
  Synthetic
aatccaagagaaaatttcttgaagtgtttttctcagtatatcccgaataatgcgacgaaccttaagttagtatacactcagaacaaccctctatatatgagcgttctaaattctacaatccaaaacctaagatttacgtccgacacgactccgaaacccctagttatagtgacaccgtcacatgttagccatatacaggccaccatactatgttccaaaaaagttgggttacaaatacgtacccgtagcgggggacacgacgctgaggggatgagttatattagtcaggtgcctttcgtcatagtggatttaagaaatatgaggtcaattaaaatcgacgttcactcacaaactgcctgggttgaggcgggggccacattgggtgaagtatattactgggtcaatgagaagaacgagaatctttcactagcagccggttattgtcccacagtctgcgccggcggtcactttggcggcggcggatacggtcccttaatgagaaattacgggcttgccgcagacaatatcatagatgctcacttagttaatgttcatggaaaagtgttagaccgtaaaagcatgggggaggatctgttttgggcgcttagagggggaggggcagaatcatttggaataatagtggcatggaaaatcaggcttgtggctgttccaaagagtaccatgttctcagtaaagaaaataatggagatccatgagctagttaaacttgtgaataaatggcaaaacatagcctataaatatgataaggacttgctgcttatgactcatttcataaccagaaacattacggataaccaagggaagaacaaaacagccatccatacctactttagctccgttttcttgggtggtgtagacagcttagttgacctgatgaacaagagttttccggaactaggtatcaagaaggaagattgtagagaactttcctggattgataccataatcttttacagcggagtcgtcaattatgacactgacaacttcaacaaggaaattttattagataggagtgcgggtcaaaatggggccttcaagatcaaactagactacgttaaaaaacccattcctgaaagtgtttttgttcagattctggagaagctgtatgaagaagatattggcgcggggatgtacgctctttatccgtacggcggcataatggatgagattagtgaaagcgccatccctttcccccacagagctggtatcctgtacgagttgtggtatatctgctcctgggagaaacaggaggataacgaaaagcacttaaattggattaggaatatctacaatttcatgacgccctacgtttccaagaaccccaggttggcctatttgaactacagggatcttgatattggaatcaacgaccccaaaaacccaaacaactacacccaggcaaggatttggggagagaagtacttcgggaagaacttcgacaggctagttaaggtgaaaacgctagttgatccaaataattttttcagaaacgaacagagtatccctcccttaccgcgtcataggcac

SEQ ID NO: 368 - DNA, 1551 bp, Artificial Sequence
  Synthetic
aaccctagagagaatttccttaaatgttttagccaatatattcccaataacgctgccaacccaaagttagtatacactcagcatgaccaattgtatatgtcagtcctaaatagtacaatacaaaacttacgttttacgtccgataccactccaaaaccgctcgtgatcgttacaccatcaaatgtatcgcacattcaggcgacaatcttgtgctctaagaaagttgggctgcaaattaggactcgatctggtggacatgattccgaaggtatgagttacatatctcaggttcctttcgtcatcgtggacttgcgcaatatgagaagcataaagattgatgtacattctcaaaccgcatgggttgaagctggcgctactttaggtgaagtctattactgggtcaatgagaaaaacgaaaatctttcattggcagcgggatattgtccgacagtttgtgccggtggccactttggcggtggcggatacggtcctctaatgagaaattatggtttagcagcagataacatcatagacgctcatttagtgaatgttcacggaaaagttcttgatcgaaagagtatgggggaagatctattctgggctctgagaggtgggggagcagaatcttttggtattattgtagcgtggaagattaggttggtagcagtaccctccaaatcgacgatgttttcagtcaaaaaaatcatggagattcatgaattagttaagttagtgaataaatggcaaaacattgcctataaatatgacaaggatttgctgctcatgactcatttcatcactcgcaatattaccgataatcaagggaaaaacaagacagctatacacacgtacttctcaagtgtttttttgggtggtgttgactccctagtcgatctcatgaataagtcattcccagaactgggaataaagaaaaccgattgccgtcaacttagctggattgacaccattattttttactctggcgtcgtcaactatgatacagacaattttaacaaagagatcttactcgatcggagtgccggacagaatggtgcttttaaaataaagttggactacgtgaagaagcctattccagaatctgtgttcgttcaaatactagaaaaattgtatgaggaagatattggagcgggcatgtacgccctttatccgtatggtggcataatggacgaaatctccgagtcggctataccctttccacatagagcaggtatcctttacgaattgtggtatatttgttcttgggaaaaacaagaagataatgaaaagcatttaaactggataaggaatatatataattttatgactccttacgtatctaaaaacccaagattggcttacttaaactatagagatttggatatcggtattaatgacccgaaaaacccaaataattatacccaggcacgaatttggggagagaaatacttcggcaaaaactttgatagattagtaaaagtgaaaactttagtcgatcctaataattttttcagaaacgaacaaagtattcctcccctgccacgtcacagacat

SEQ ID NO: 369 - DNA, 1548 bp, Artificial Sequence
  Synthetic
aatccaagagaaaatttcttgaagtgtttttctcagtatatcccgaataatgcgacgaaccttaagttagtatacactcagaacaaccctctatatatgagcgttctaaattctacaatccacaacctaagatttacgtccgacacgactccgaaacccctagttatagtgacaccgtcacatgttagccatatacagggcaccatactatgtgcaaaaaaagttgggttacaaatacgtacccgtagcgggggacacgacgctgaggggatgagttatattagtcaggtgcctttcgtcatagtggatttaagaaatatgaggtcaattaaaatcgacgttcactcacaaactgcctgggttgaggcgggggccacattgggtgaagtatattactgggtcaatgagaagaacgagaatctttcactagcagccggttattgtcccacagtctgcgccggcggtcactttggcggcggcggatacggtcccttaatgagaaattacgggcttgccgcagacaatatcatagatgctcacttagttaatgttaacggaaaagtgttagaccgtaaaagcatgggggaggatctgttttgggcgcttagagggggaggggcagaatcatttggaataatagtggcatggaaaatcaggcttgtggctgttccaaagagtaccatgttctcagtaaagaaaataatggagatccatgagctagttaaacttgtgaataaatggcaaaacatagcctataaatatgataaggacttgctgcttatgactcatttcataaccagaaacattacggataaccaagggaagaacaaaacagccatccatacctactttagctccgttttcttgggtggtgtagacagcttagttgacctgatgaacaagagttttccggaactaggtatcaagaagacagattgtagacaactttcctggattgataccataatcttttacagcggagtcgtcaattatgacactgacaacttcaacaaggaaattttattagataggagtgcgggtcaaaatggggccttcaagatcaaactagactacgttaaaaaacccattcctgaaagtgtttttgttcagattctggagaagctgtatgaagaagatattggcgcggggatgtacgctctttatccgtacggcggcataatggatgagattagtgaaagcgccatccctttcccccacagagctggtatcctgtacgagttgtggtatatctgctcctgggagaaacaggaggataacgaaaagcacttaaattggattaggaatatctacaatttcatgacgccctacgtttccaagaaccccaggttggcctatttgaactacagggatcttgatattggaatcaacgaccccaaaaacccaaacaactacacccaggcaaggatttggggagagaagtacttcgggaagaacttcgacaggctagttaaggtgaaaacgctagttgatccaaataattttttcagaaacgaacagagtatccctcccttaccgcgtcataggcac

SEQ ID NO: 370 - DNA, 1548 bp, Artificial Sequence
  Synthetic
aatccaagagaaaatttcttgaagtgtttttctcagtatatcccgaataatgcgacgaaccttaagttagtatacactcagaacaaccctctatatatgagcgttctaaattctacaatccacaacctaagatttacgtccgacacgactccgaaacccctagttatagtgacaccgtcacatgttagccatatacaggctaccatactatgttccaaaaaagttgggttacaaatacgtacccgtagcgggggacacgacagtgaggggatgagttatattagtcaggtgcctttcgtcatagtggatttaagaaatatgaggtcaattaaaatcgacgttcactcacaaactgcctgggttgaggcgggggccacattgggtgaagtatattactgggtcaatgagaagaacgagaatctttcactagcagccggttattgtcccacagtctgcgccggcggtcactttggcggcggcggatacggtcccttaatgagaaattacgggcttgccgcagacaatatcatagatgctcacttagttaatgttaacggaaaagtgttagaccgtaaaagcatgggggaggatctgttttgggcgcttagagggggaggggcagaatcatttggaataatagtggcatggaaaatcaggcttgtggctgttccaaagagtaccatgttctcagtaaagaaaataatggagatccatgagctagttaaacttgtgaataaatggcaaaacatagcctataaatatgataaggacttgctgcttatgactcatttcataaccagaaacattacggataaccaagggaagaacaaaacagccatccatacctactttagctccgttttcttgggtggtgtagacagcttagttgacctgatgaacaagagttttccggaactaggtatcaagaaggaagattgtagagaactttcctggattgataccataatcttttacagcggagtcgtcaattatgacactgacaacttcaacaaggaaattttattagataggagtgcgggtcaaaatggggccttcaagatcaaactagactacgttaaaaaacccattcctgaaagtgtttttgttcagattctggagaagctgtatgaagaagatattggcgcggggatgtacgtactttatccgtacggcggcataatggatgagattagtgaaagcgccatccctttcccccacagagctggtatcctgtacgagttgtggtatatctgctcctgggagaaacaggaggataacgaaaagcacttaaattggattaggaatatctacaatttcatgacgccctacgtttccaagaaccccaggttggcctatttgaactacagggatcttgatattggaatcaacaatcccaaaaacccaaacaactacacccaggcaaggatttggggagagaagtacttcgggaagaacttcgacaggctagttaaggtgaaaacgctagttgatccaaataattttttcagaaacgaacagagtatccctcccttaccgcgtcataggcac

SEQ ID NO: 371 - DNA, 1548 bp, Artificial Sequence
  Synthetic
aatccaagagaaaatttcttgaagtgtttttctcagtatatcccgaataatgcgacgaaccttaagttagtatacactcagaacaaccctctatatatgagcgttctaaattctacaatccaaaacctaagatttacgtccgacacgactccgaaacccctagttatagtgacaccgtcacatgttagccatatacaggccaccatactatgttccaaaaaagttgggttacaaatacgtacccgtagcgggggacacgacgcagaggggatgagttatattagtcaggtgcctttcgtcatagtggatttaagaaatatgaggtcaattaaaatcgacgttcactcacaaactgcctgggttgaggcgggggccacattgggtgaagtatattactgggtcaatgagaagaacgagaatctttcactagcagccggttattgtcccacagtctgcgccggcggtcactttggcggcggcggatacggtcccttaatgagaaattacgggcttgccgcagacaatatcatagatgctcacttagttaatgttaacggaaaagtgttagaccgtaaaagcatgggggaggatctgttttgggcgcttagagggggaggggcagaatcatttggaataatagtggcatggaaaatcaggcttgtggctgttccaaagagtaccatgttctcagtaaagaaaataatggagatccatgagctagttaaacttgtgaataaatggcaaaacatagcctataaatatgataaggacttgctgcttatgactcatttcataaccagaaacattacggataaccaagggaagaacaaaacagccatccatacctactttagctccgttttcttgggtggtgtagacagcttagttgacctgatgaacaagagttttccggaactaggtatcaagaaggaagattgtagagaactttcctggattgataccataatcttttacagcggagtcgtcaattatgacactgacaacttcaacaaggaaattttattagataggagtgcgggtcaaaatggggccttcaagatcaaactagactacgttaaaaaacccattcctgaaagtgtttttgttcagattctggagaagctgtatgaagaagatattggcgcggggatgtacgctctttatccgtacggcggcataatggatgagattagtgaaagcgccatccctttcccccacagagctggtatcctgtacgagttgtggtatatctgctcctgggagaaacaggaggataacgaaaagcacttaaattggattaggaatatctacaatttcatgacgccctacgtttccaagaaccccaggttggcctatttgaactacagggatcttgatattggaatcaacgaccccaaaaacccaaacaactacacccaggcaaggatttggggagagaagtacttcgggaagaacttcgacaggctagttaaggtgaaaacgctagttgatccaaataattttttcagaaacgaacagagtatccctcccttaccgcgtcataggcac

SEQ ID NO: 372 - DNA, 1548 bp, Artificial Sequence
  Synthetic
aatccaagagaaaatttcttgaagtgtttttctcagtatatcccgaataatgcgacgaaccttaacttagtatacactcagaacaaccctctatatatgagcgttctaaattctacaatccaaaacctaagatttacgtccgacacgactccgaaacccctagttatagtgacaccgtcacatgttagccatatacaggccaccatactatgttccaaaaaagttgggttacaaatacgtacccgtagcgggggacacgacagtgaggggatgagttatattagtcaggtgcctttcgtcatagtggatttaagaaatatgaggtcaattaaaatcgacgttcactcacaaactgcctgggttgaggcgggggccacattgggtgaagtatattactgggtcaatgagaagaacgagaatctttcactagcagccggttattgtcccacagtctgcgccggcggtcactttggcggcggcggatacggtcccttaatgagaaattacgggcttgccgcagacaatatcatagatgctcacttagttaatgttcatggaaaagtgttagaccgtaaaagcatgggggaggatctgttttgggcgcttagagggggaggggcagaatcatttggaataatagtggcatggaaaatcaggcttgtggctgttccaaagagtaccatgttctcagtaaagaaaataatggagatccatgagctagttaaacttgtgaataaatggcaaaacatagcctataaatatgataaggacttgctgcttatgactcatttcataaccagaaacattacggataaccaagggaagaacaaaacagccatccatacctactttagctccgttttcttgggtggtgtagacagcttagttgacctgatgaacaagagttttccggaactaggtatcaagaagacagattgtagagaactttcctggattgataccataatcttttacagcggagtcgtcaattatgacactgacaacttcaacaaggaaattttattagataggagtgcgggtcaaaatggggccttcaagatcaaactagactacgttaaaaaacccattcctgaaagtgtttttgttcagattctggagaagctgtatgaagaagatattggcgcggggatgtacgctctttatccgtacggcggcataatggatgagattagtgaaagcgccatccctttcccccacagagctggtatcctgtacgagttgtggtatatctgctcctgggagaaacaggaggataacgaaaagcacttaaattggattaggaatatctacaatttcatgacgccctacgtttccaagaaccccaggttggcctatttgaactacagggatcttgatattggaatcaacgaccccaaaaacccaaacaactacacccaggcaaggatttggggagagaagtacttcgggaagaacttcgacaggctagttaaggtgaaaacgctagttgatccaaataattttttcagaaacgaacagagtatccctcccttaccgcgtcataggcac

SEQ ID NO: 373 - DNA, 1548 bp, Artificial Sequence
  Synthetic
aatccaagagaaaatttcttgaagtgtttttctcagtatatcccgaataatgcgacgaaccttaagttagtatacactcagaacaaccctctatatatgagcgttctaaattctacaatccacaacctaagatttacgtccgacacgactccgaaacccctagttatagtgacaccgtcacatgttagccatatacaggctaccatactatgttccaaaaaagttgggttacaaatacgtacccgtagcgggggacacgacagtgaggggatgagttatattagtcaggtgcctttcgtcatagtggatttaagaaatatgaggtcaattaaaatcgacgttcactcacaaactgcctgggttgaggcgggggccacattgggtgaagtatattactgggtcaatgagaagaacgagaatctttcactagcagccggttattgtcccacagtctgcgccggcggtcactttggcggcggcggatacggtcccttaatgagaaattacgggcttgccgcagacaatatcatagatgctcacttagttaatgttcatggaaaagtgttagaccgtaaaagcatgggggaggatctgttttgggcgcttagagggggaggggcagaatcatttggaataatagtggcatggaaaatcaggcttgtggctgttccaaagagtaccatgttctcagtaaagaaaataatggagatccatgagctagttaaacttgtgaataaatggcaaaacatagcctataaatatgataaggacttgctgcttatgactcatttcataaccagaaacattacggataaccaagggaagaacaaaacagccatccatacctactttagctccgttttcttgggtggtgtagacagcttagttgacctgatgaacaagagttttccggaactaggtatcaagaaggaagattgtagacaaatgtcctggattgataccataatcttttacagcggagtcgtcaattatgacactgacaacttcaacaaggaaattttattagataggagtgcgggtcaaaatggggccttcaagatcaaactagactacgttaaaaaacccattcctgaaagtgtttttgttcagattctggagaagctgtatgaagaagatattggcgcggggatgtacgtactttatccgtacggcggcataatggatgagattagtgaaagcgccatccctttcccccacagagctggtatcctgtacgagttgtggtatatctgctcctgggagaaacaggaggataacgaaaagcacttaaattggattaggaatatctacaatttcatgacgccctacgtttccaagaaccccaggttggcctatttgaactacagggatcttgatattggaatcaacgaccccaaaaacccaaacaactacacccaggcaaggatttggggagagaagtacttcgggaagaacttcgacaggctagttaaggtgaaaacgctagttgatccaaataattttttcagaaacgaacagagtatccctcccttaccgcgtcataggcac

SEQ ID NO: 374 - DNA, 1551 bp, Artificial Sequence
  Synthetic
aacccccaagagaatttcctaaaatgcttttcgcagtacataccaaataacgctgccaatcctaagctggtgtatacgcaacacgatcaattatatatgagcgtacttaacagtaccattcagaatttaagatttacttctgacacaacaccgaaacctttggttatcgtcactccatccaatgtttcacatattcaagcaaccatcttgtgtagtaagaaagtaggtctgcaaataaggacacgatcaggaggccatgattctgaaggtatgtcctacatttctcaggttccattcgtcattgtggatcttagaaacatgcggagcataaaaattgacgtgcattcgcaaacggcgtgggttgaagcaggggctactttaggtgaagtctattactgggtaaatgagaagaacgaaaatctttctctagcagccggatattgtccgacagtttgtgctggcggacactttggtggtgggggctatggtcctttgatgcgtaattacggtttagctgccgataacatcatcgacgcccatctcgtgaatgtacacggaaaagttttggatagaaagtcaatgggagaggatctattctgggctctgaggggcgggggtgcagaatcatttggtataattgtcgcgtggaagatacgcttagttgcggttccatccaaaagtacgatgttttccgtaaagaaaattatggaaatccatgaattggtgaaattggtaaataagtggcaaaacatcgcctataaatatgacaaagatttattactaatgacccattttatcactagaaatataacagacaaccagggcaagaacaagacagctattcacacctacttctcatctgttttcctagggggtgttgatagtcttgtggatttaatgaataaatctttccccgaattgggcattaagaaaactgattgccgtcaactctcctggattgatactataattttttattcaggggttgtgaattacgataccgacaattttaacaaagagatattgcttgatagaagcgcaggccagaatggtgctttcaagataaaactggattacgtcaagaaacctattccagaaagtgtctttgttcaaattttagaaaagctttatgaggaagatatcggagcgggaatgtatgccctttacccttatgggggtatcatggacgaaatctcggagtccgctattccctttccacacagggcaggtattttgtacgaactctggtatatttgttcttgggagaaacaagaagataacgagaaacatttaaactggattcgaaacatatataattttatgacaccttacgtcagtaagaacccaagactggcctatttaaattatagagatttggacataggtattaacgatccaaagaatcccaataactatactcaagcaaggatctggggcgaaaaatactttggtaaaaattttgacagacttgttaaagttaagacgttggtcgaccccaataacttcttccgcaacgaacaatccattccaccgttacctagacatcgtcac

SEQ ID NO: 375 - DNA, 1548 bp, Artificial Sequence
  Synthetic
aatccaagagaaaatttcttgaagtgtttttctcagtatatcccgaataatgcgacgaaccttaagttagtatacactcagaacaaccctctatatatgagcgttctaaattctacaatccacaacctaagatttacgtccgacacgactccgaaacccctagttatagtgacaccgtcacatgttagccatatacaggctaccatactatgttccaaaaaagttgggttacaaatacgtacccgtagcgggggacacgacagtgaggggatgagttatattagtcaggtgcctttcgtcatagtggatttaagaaatatgaggtcaattaaaatcgacgttcactcacaaactgcctgggttgaggcgggggccacattgggtgaagtatattactgggtcaatgagaagaacgagaatctttcactagcagccggttattgtcccacagtctgcgccggcggtcactttggcggcggcggatacggtcccttaatgagaaattacgggcttgccgcagacaatatcatagatgctcacttagttaatgttcatggaaaagtgttagaccgtaaaagcatgggggaggatctgttttgggcgcttagagggggaggggcagaatcatttggaataatagtggcatggaaaatcaggcttgtggctgttccaaagagtaccatgttctcagtaaagaaaataatggagatccatgagctagttaaacttgtgaataaatggcaaaacatagcctataaatatgataaggacttgctgcttatgactcatttcataaccagaaacattacggataaccaagggaagaacaaaacagccatccatacctactttagctccgttttcttgggtggtgtagacagcttagttgacctgatgaacaagagttttccggaactaggtatcaagaaggaagattgtagagaaatgtcctggattgataccataatcttttacagcggagtcgtcaattatgacactgacaacttcaacaaggaaattttattagataggagtgcgggtcaaaatggggccttcaagatcaaactagactacgttaaaaaacccattcctgaaagtgtttttgttcagattctggagaagctgtatgaagaagatattggcgcggggatgtacgtactttatccgtacggcggcataatggatgagattagtgaaagcgccatccctttcccccacagagctggtatcctgtacgagttgtggtatatctgctcctgggagaaacaggaggataacgaaaagcacttaaattggattaggaatatctacaatttcatgacgccctacgtttccaagaaccccaggttggcctatttgaactacagggatcttgatattggaatcaacgaccccaaaaacccaaacaactacacccaggcaaggatttggggagagaagtacttcgggaagaacttcgacaggctagttaaggtgaaaacgctagttgatccaaataattttttcagaaacgaacagagtatccctcccttaccgcgtcataggcac

SEQ ID NO: 376 - DNA, 1548 bp, Artificial Sequence
  Synthetic
aatccaagagaaaatttcttgaagtgtttttctcagtatatcccgaataatgcgacgaaccttaagttagtatacactcagaacaaccctctatatatgagcgttctaaattctacaatccacaacctaagatttacgtccgacacgactccgaaacccctagttatagtgacaccgtcacatgttagccatatacaggccaccatactatgttccaaaaaagttgggttacaaatacgtacccgtagcgggggacacgacgctgaggggatgagttatattagtcaggtgcctttcgtcatagtggatttaagaaatatgaggtcaattaaaatcgacgttcactcacaaactgcctgggttgaggcgggggccacattgggtgaagtatattactgggtcaatgagaagaacgagaatctttcactagcagccggttattgtcccacagtctgcgccggcggtcactttggcggcggcggatacggtcccttaatgagaaattacgggcttgccgcagacaatatcatagatgctcacttagttaatgttcatggaaaagtgttagaccgtaaaagcatgggggaggatctgttttgggcgcttagagggggaggggcagaatcatttggaataatagtggcatggaaaatcaggcttgtggctgttccaaagagtaccatgttctcagtaaagaaaataatggagatccatgagctagttaaacttgtgaataaatggcaaaacatagcctataaatatgataaggacttgctgcttatgactcatttcataaccagaaacattacggataaccaagggaagaacaaaacagccatccatacctactttagctccgttttcttgggtggtgtagacagcttagttgacctgatgaacaagagttttccggaactaggtatcaagaaggaagattgtagagaaatgtcctggattgataccataatcttttacagcggagtcgtcaattatgacactgacaacttcaacaaggaaattttattagataggagtgcgggtcaaaatggggccttcaagatcaaactagactacgttaaaaaacccattcctgaaagtgtttttgttcagattctggagaagctgtatgaagaagatattggcgcggggatgtacgctctttatccgtacggcggcataatggatgagattagtgaaagcgccatccctttcccccacagagctggtatcctgtacgagttgtggtatatctgctcctgggagaaacaggaggataacgaaaagcacttaaattggattaggaatatctacaatttcatgacgccctacgtttccaagaaccccaggttggcctatttgaactacagggatcttgatattggaatcaacgaccccaaaaacccaaacaactacacccaggcaaggatttggggagagaagtacttcgggaagaacttcgacaggctagttaaggtgaaaacgctagttgatccaaataattttttcagaaacgaacagagtatccctcccttaccgcgtcataggcac

SEQ ID NO: 377 - DNA, 1548 bp, Artificial Sequence
  Synthetic
aatccaagagaaaatttcttgaagtgtttttctcagtatatcccgaataatgcgacgaaccttaacttagtatacactcagaacaaccctctatatatgagcgttctaaattctacaatccaaaacctaagatttacgtccgacacgactccgaaacccctagttatagtgacaccgtcacatgttagccatatacaggccaccatactatgttccaaaaaagttgggttacaaatacgtacccgtagcgggggacacgacagtgaggggatgagttatattagtcaggtgcctttcgtcatagtggatttaagaaatatgaggtcaattaaaatcgacgttcactcacaaactgcctgggttgaggcgggggccacattgggtgaagtatattactgggtcaatgagaagaacgagaatctttcactagcagccggttattgtcccacagtctgcgccggcggtcactttggcggcggcggatacggtcccttaatgagaaattacgggcttgccgcagacaatatcatagatgctcacttagttaatgttaacggaaaagtgttagaccgtaaaagcatgggggaggatctgttttgggcgcttagagggggaggggcagaatcatttggaataatagtggcatggaaaatcaggcttgtggctgttccaaagagtaccatgttctcagtaaagaaaataatggagatccatgagctagttaaacttgtgaataaatggcaaaacatagcctataaatatgataaggacttgctgcttatgactcatttcataaccagaaacattacggataaccaagggaagaacaaaacagccatccatacctactttagctccgttttcttgggtggtgtagacagcttagttgacctgatgaacaagagttttccggaactaggtatcaagaagacagattgtagagaaatgtcctggattgataccataatcttttacagcggagtcgtcaattatgacactgacaacttcaacaaggaaattttattagataggagtgcgggtcaaaatggggccttcaagatcaaactagactacgttaaaaaacccattcctgaaagtgtttttgttcagattctggagaagctgtatgaagaagatattggcgcggggatgtacgtactttatccgtacggcggcataatggatgagattagtgaaagcgccatccctttcccccacagagctggtatcctgtacgagttgtggtatatctgctcctgggagaaacaggaggataacgaaaagcacttaaattggattaggaatatctacaatttcatgacgccctacgtttccaagaaccccaggttggcctatttgaactacagggatcttgatattggaatcaacgaccccaaaaacccaaacaactacacccaggcaaggatttggggagagaagtacttcgggaagaacttcgacaggctagttaaggtgaaaacgctagttgatccaaataattttttcagaaacgaacagagtatccctcccttaccgcgtcataggcac

SEQ ID NO: 378 - DNA, 1548 bp, Artificial Sequence
  Synthetic
aatccaagagaaaatttcttgaagtgtttttctcagtatatcccgaataatgcgacgaaccttaacttagtatacactcagaacaaccctctatatatgagcgttctaaattctacaatccacaacctaagatttacgtccgacacgactccgaaacccctagttatagtgacaccgtcacatgttagccatatacaggcaaccatactatgttccaaaaaagttgggttacaaatacgtacccgtagcgggggacacgacgccgaggggatgagttatattagtcaggtgcctttcgtcatagtggatttaagaaatatgaggtcaattaaaatcgacgttcactcacaaactgcctgggttgaggcgggggccacattgggtgaagtatattactgggtcaatgagaagaacgagaatctttcactagcagccggttattgtcccacagtctgcgccggcggtcactttggcggcggcggatacggtcccttaatgagaaattacgggcttgccgcagacaatatcatagatgctcacttagttaatgttaacggaaaagtgttagaccgtaaaagcatgggggaggatctgttttgggcgcttagagggggaggggcagaatcatttggaataatagtggcatggaaaatcaggcttgtggctgttccaaagagtaccatgttctcagtaaagaaaataatggagatccatgagctagttaaacttgtgaataaatggcaaaacatagcctataaatatgataaggacttgctgcttatgactcatttcataaccagaaacattacggataaccaagggaagaacaaaacagccatccatacctactttagctccgttttcttgggtggtgtagacagcttagttgacctgatgaacaagagttttccggaactaggtatcaagaagacagattgtagacaaatgtcctggattgataccataatcttttacagcggagtcgtcaattatgacactgacaacttcaacaaggaaattttattagataggagtgcgggtcaaaatggggccttcaagatcaaactagactacgttaaaaaacccattcctgaaagtgtttttgttcagattctggagaagctgtatgaagaagatattggcgcggggatgtacgctctttatccgtacggcggcataatggatgagattagtgaaagcgccatccctttcccccacagagctggtatcctgtacgagttgtggtatatctgctcctgggagaaacaggaggataacgaaaagcacttaaattggattaggaatatctacaatttcatgacgccctacgtttccaagaaccccaggttggcctatttgaactacagggatcttgatattggaatcaacgaccccaaaaacccaaacaactacacccaggcaaggatttggggagagaagtacttcgggaagaacttcgacaggctagttaaggtgaaaacgctagttgatccagataattttttcagaaacgaacagagtatccctcccttaccgcgtcataggcac

SEQ ID NO: 379 - DNA, 1548 bp, Artificial Sequence
  Synthetic
aatccaagagaaaatttcttgaagtgtttttctcagtatatcccgaataatgcgacgaaccttaacttagtatacactcagaacaaccctctatatatgagcgttctaaattctacaatccacaacctaagatttacgtccgacacgactccgaaacccctagttatagtgacaccgtcacatgttagccatatacaggccaccatactatgttccaaaaaagttgggttacaaatacgtacccgtagcgggggacacgacagtgaggggatgagttatattagtcaggtgcctttcgtcatagtggatttaagaaatatgaggtcaattaaaatcgacgttcactcacaaactgcctgggttgaggcgggggccacattgggtgaagtatattactgggtcaatgagaagaacgagaatctttcactagcagccggttattgtcccacagtctgcgccggcggtcactttggcggcggcggatacggtcccttaatgagaaattacgggcttgccgcagacaatatcatagatgctcacttagttaatgttaacggaaaagtgttagaccgtaaaagcatgggggaggatctgttttgggcgcttagagggggaggggcagaatcatttggaataatagtggcatggaaaatcaggcttgtggctgttccaaagagtaccatgttctcagtaaagaaaataatggagatccatgagctagttaaacttgtgaataaatggcaaaacatagcctataaatatgataaggacttgctgcttatgactcatttcataaccagaaacattacggataaccaagggaagaacaaaacagccatccatacctactttagctccgttttcttgggtggtgtagacagcttagttgacctgatgaacaagagttttccggaactaggtatcaagaaggaagattgtagagaactttcctggattgataccataatcttttacagcggagtcgtcaattatgacactgacaacttcaacaaggaaattttattagataggagtgcgggtcaaaatggggccttcaagatcaaactagactacgttaaaaaacccattcctgaaagtgtttttgttcagattctggagaagctgtatgaagaagatattggcgcggggatgtacgtactttatccgtacggcggcataatggatgagattagtgaaagcgccatccctttcccccacagagctggtatcctgtacgagttgtggtatatctgctcctgggagaaacaggaggataacgaaaagcacttaaattggattaggaatatctacaatttcatgacgccctacgtttccaagaaccccaggttggcctatttgaactacagggatcttgatattggaatcaacaatcccaaaaacccaaacaactacacccaggcaaggatttggggagagaagtacttcgggaagaacttcgacaggctagttaaggtgaaaacgctagttgatccaaataattttttcagaaacgaacagagtatccctcccttaccgcgtcataggcac

SEQ ID NO: 380 - DNA, 1548 bp, Artificial Sequence
  Synthetic
aatccaagagaaaatttcttgaagtgtttttctcagtatatcccgaataatgcgacgaaccttaagttagtatacactcagaacaaccctctatatatgagcgttctaaattctacaatccacaacctaagatttacgtccgacacgactccgaaacccctagttatagtgacaccgtcacatgttagccatatacaggcaaccatactatgttccaaaaaagttgggttacaaatacgtacccgtagcgggggacacgacagtgaggggatgagttatattagtcaggtgcctttcgtcatagtggatttaagaaatatgaggtcaattaaaatcgacgttcactcacaaactgcctgggttgaggcgggggccacattgggtgaagtatattactgggtcaatgagaagaacgagaatctttcactagcagccggttattgtcccacagtctgcgccggcggtcactttggcggcggcggatacggtcccttaatgagaaattacgggcttgccgcagacaatatcatagatgctcacttagttaatgttaacggaaaagtgttagaccgtaaaagcatgggggaggatctgttttgggcgcttagagggggaggggcagaatcatttggaataatagtggcatggaaaatcaggcttgtggctgttccaaagagtaccatgttctcagtaaagaaaataatggagatccatgagctagttaaacttgtgaataaatggcaaaacatagcctataaatatgataaggacttgctgcttatgactcatttcataaccagaaacattacggataaccaagggaagaacaaaacagccatccatacctactttagctccgttttcttgggtggtgtagacagcttagttgacctgatgaacaagagttttccggaactaggtatcaagaaggaagattgtagacaactttcctggattgataccataatcttttacagcggagtcgtcaattatgacactgacaacttcaacaaggaaattttattagataggagtgcgggtcaaaatacagccttcaagatcaaactagactacgttaaaaaacccattcctgaaagtgtttttgttcagattctggagaagctgtatgaagaagatattggcgtagggatgtacgtactttatccgtacggcggcataatggatgagattagtgaaagcgccatccctttcccccacagagctggtatcctgtacgagttgtggtatgtctgctcctgggagaaacaggaggataacgaaaagcacttaaattggattaggaatatctacaatttcatgacgccctacgtttccaagaaccccaggttggcctatttgaactacagggatcttgatattggaatcaacgaccccaaaaacccaaacaactacacccaggcaaggatttggggagagaagtacttcgggaagaacttcgacaggctagttaaggtgaaaacgctagttgatccaaataattttttcagaaacgaacagagtatccctcccttaccgcgtcataggcac

SEQ ID NO: 381 - DNA, 1548 bp, Artificial Sequence
  Synthetic
aatccaagagaaaatttcttgaagtgtttttctcagtatatcccgaataatgcgacgaaccttaagttagtatacactcagaacaaccctctatatatgagcgttctaaattctacaatccacaacctaagatttacgtccgacacgactccgaaacccctagttatagtgacaccgtcacatgttagccatatacaggctaccatactatgttccaaaaaagttgggttacaaatacgtacccgtagcgggggacacgacgccgaggggatgagttatattagtcaggtgcctttcgtcatagtggatttaagaaatatgaggtcaattaaaatcgacgttcactcacaaactgcctgggttgaggcgggggccacattgggtgaagtatattactgggtcaatgagaagaacgagaatctttcactagcagccggttattgtcccacagtctgcgccggcggtcactttggcggcggcggatacggtcccttaatgagaaattacgggcttgccgcagacaatatcatagatgctcacttagttaatgttcatggaaaagtgttagaccgtaaaagcatgggggaggatctgttttgggcgcttagagggggaggggcagaatcatttggaataatagtggcatggaaaatcaggcttgtggctgttccaaagagtaccatgttctcagtaaagaaaataatggagatccatgagctagttaaacttgtgaataaatggcaaaacatagcctataaatatgataaggacttgctgcttatgactcatttcataaccagaaacattacggataaccaagggaagaacaaaacagccatccatacctactttagctccgttttcttgggtggtgtagacagcttagttgacctgatgaacaagagttttccggaactaggtatcaagaaggaagattgtagacaactttcctggattgataccataatcttttacagcggagtcgtcaattatgacactgacaacttcaacaaggaaattttattagataggagtgcgggtcaaaatggggccttcaagatcaaactagactacgttaaaaaacccattcctgaaagtgtttttgttcagattctggagaagctgtatgaagaagatattggcgcggggatgtacgctctttatccgtacggcggcataatggatgagattagtgaaagcgccatccctttcccccacagagctggtatcctgtacgagttgtggtatatctgctcctgggagaaacaggaggataacgaaaagcacttaaattggattaggaatatctacaatttcatgacgccctacgtttccaagaaccccaggttggcctatttgaactacagggatcttgatattggaatcaacgaccccaaaaacccaaacaactacacccaggcaaggatttggggagagaagtacttcgggaagaacttcgacaggctagttaaggtgaaaacgctagttgatccaaataattttttcagaaacgaacagagtatccctcccttaccgcgtcataggcac

SEQ ID NO: 382 - DNA, 1548 bp, Artificial Sequence
  Synthetic
aatccaagagaaaatttcttgaagtgtttttctcagtatatcccgaataatgcgacgaaccttaagttagtatacactcagaacaaccctctatatatgagcgttctaaattctacaatccacaacctaagatttacgtccgacacgactccgaaacccctagttatagtgacaccgtcacatgttagccatatacaggccaccatactatgttccaaaaaagttgggttacaaatacgtacccgtagcgggggacacgacagtgaggggatgagttatattagtcaggtgcctttcgtcatagtggatttaagaaatatgaggtcaattaaaatcgacgttcactcacaaactgcctgggttgaggcgggggccacattgggtgaagtatattactgggtcaatgagaagaacgagaatctttcactagcagccggttattgtcccacagtctgcgccggcggtcactttggcggcggcggatacggtcccttaatgagaaattacgggcttgccgcagacaatatcatagatgctcacttagttaatgttaacggaaaagtgttagaccgtaaaagcatgggggaggatctgttttgggcgcttagagggggaggggcagaatcatttggaataatagtggcatggaaaatcaggcttgtggctgttccaaagagtaccatgttctcagtaaagaaaataatggagatccatgagctagttaaacttgtgaataaatggcaaaacatagcctataaatatgataaggacttgctgcttatgactcatttcataaccagaaacattacggataaccaagggaagaacaaaacagccatccatacctactttagctccgttttcttgggtggtgtagacagcttagttgacctgatgaacaagagttttccggaactaggtatcaagaagacagattgtagagaaatgtcctggattgataccataatcttttacagcggagtcgtcaattatgacactgacaacttcaacaaggaaattttattagataggagtgcgggtcaaaatggggccttcaagatcaaactagactacgttaaaaaacccattcctgaaagtgtttttgttcagattctggagaagctgtatgaagaagatattggcgcggggatgtacgtactttatccgtacggcggcataatggatgagattagtgaaagcgccatccctttcccccacagagctggtatcctgtacgagttgtggtatatctgctcctgggagaaacaggaggataacgaaaagcacttaaattggattaggaatatctacaatttcatgacgccctacgtttccaagaaccccaggttggcctatttgaactacagggatcttgatattggaatcaacgaccccaaaaacccaaacaactacacccaggcaaggatttggggagagaagtacttcgggaagaacttcgacaggctagttaaggtgaaaacgctagttgatccaaataattttttcagaaacgaacagagtatccctcccttaccgcgtcataggcac

SEQ ID NO: 383 - DNA, 1548 bp, Artificial Sequence
  Synthetic
aatccaagagaaaatttcttgaagtgtttttctcagtatatcccgaataatgcgacgaaccttaagttagtatacactcagaacaaccctctatatatgagcgttctaaattctacaatccacaacctaagatttacgtccgacacgactccgaaacccctagttatagtgacaccgtcacatgttagccatatacaggctaccatactatgttccaaaaaagttgggttacaaatacgtacccgtagcgggggacacgacgccgaggggatgagttatattagtcaggtgcctttcgtcatagtggatttaagaaatatgaggtcaattaaaatcgacgttcactcacaaactgcctgggttgaggcgggggccacattgggtgaagtatattactgggtcaatgagaagaacgagaatctttcactagcagccggttattgtcccacagtctgcgccggcggtcactttggcggcggcggatacggtcccttaatgagaaattacgggcttgccgcagacaatatcatagatgctcacttagttaatgttaacggaaaagtgttagaccgtaaaagcatgggggaggatctgttttgggcgcttagagggggaggggcagaatcatttggaataatagtggcatggaaaatcaggcttgtggctgttccaaagagtaccatgttctcagtaaagaaaataatggagatccatgagctagttaaacttgtgaataaatggcaaaacatagcctataaatatgataaggacttgctgcttatgactcatttcataaccagaaacattacggataaccaagggaagaacaaaacagccatccatacctactttagctccgttttcttgggtggtgtagacagcttagttgacctgatgaacaagagttttccggaactaggtatcaagaagacagattgtagagaaatgtcctggattgataccataatcttttacagcggagtcgtcaattatgacactgacaacttcaacaaggaaattttattagataggagtgcgggtcaaaatggggccttcaagatcaaactagactacgttaaaaaacccattcctgaaagtgtttttgttcagattctggagaagctgtatgaagaagatattggcgcggggatgtacgctctttatccgtacggcggcataatggatgagattagtgaaagcgccatccctttcccccacagagctggtatcctgtacgagttgtggtatatctgctcctgggagaaacaggaggataacgaaaagcacttaaattggattaggaatatctacaatttcatgacgccctacgtttccaagaaccccaggttggcctatttgaactacagggatcttgatattggaatcaacgaccccaaaaacccaaacaactacacccaggcaaggatttggggagagaagtacttcgggaagaacttcgacaggctagttaaggtgaaaacgctagttgatccaaataattttttcagaaacgaacagagtatccctcccttaccgcgtcataggcac

SEQ ID NO: 384 - DNA, 1548 bp, Artificial Sequence
  Synthetic
aatccaagagaaaatttcttgaagtgtttttctcagtatatcccgaataatgcgacgaaccttaacttagtatacactcagaacaaccctctatatatgagcgttctaaattctacaatccacaacctaagatttacgtccgacacgactccgaaacccctagttatagtgacaccgtcacatgttagccatatacaggcaaccatactatgttccaaaaaagttgggttacaaatacgtacccgtagcgggggacacgacagtgaggggatgagttatattagtcaggtgcctttcgtcatagtggatttaagaaatatgaggtcaattaaaatcgacgttcactcacaaactgcctgggttgaggcgggggccacattgggtgaagtatattactgggtcaatgagaagaacgagaatctttcactagcagccggttattgtcccacagtctgcgccggcggtcactttggcggcggcggatacggtcccttaatgagaaattacgggcttgccgcagacaatatcatagatgctcacttagttaatgttcatggaaaagtgttagaccgtaaaagcatgggggaggatctgttttgggcgcttagagggggaggggcagaatcatttggaataatagtggcatggaaaatcaggcttgtggctgttccaaagagtaccatgttctcagtaaagaaaataatggagatccatgagctagttaaacttgtgaataaatggcaaaacatagcctataaatatgataaggacttgctgcttatgactcatttcataaccagaaacattacggataaccaagggaagaacaaaacagccatccatacctactttagctccgttttcttgggtggtgtagacagcttagttgacctgatgaacaagagttttccggaactaggtatcaagaagacagattgtagacaactttcctggattgataccataatcttttacagcggagtcgtcaattatgacactgacaacttcaacaaggaaattttattagataggagtgcgggtcaaaatggggccttcaagatcaaactagactacgttaaaaaacccattcctgaaagtgtttttgttcagattctggagaagctgtatgaagaagatattggcgcggggatgtacgtcctttatccgtacggcggcataatggatgagattagtgaaagcgccatccctttcccccacagagctggtatcctgtacgagttgtggtatatctgctcctgggagaaacaggaggataacgaaaagcacttaaattggattaggaatatctacaatttcatgacgccctacgtttccaagaaccccaggttggcctatttgaactacagggatcttgatattggaatcaacgaccccaaaaacccaaacaactacacccaggcaaggatttggggagagaagtacttcgggaagaacttcgacaggctagttaaggtgaaaacgctagttgatccaaataattttttcagaaacgaacagagtatccctcccttaccgcgtcataggcac

SEQ ID NO: 385 - DNA, 1548 bp, Artificial Sequence
  Synthetic
aatccaagagaaaatttcttgaagtgtttttctcagtatatcccgaataatgcgacgaaccttaagttagtatacactcagaacaaccctctatatatgagcgttctaaattctacaatccacaacctaagatttacgtccgacacgactccgaaacccctagttatagtgacaccgtcacatgttagccatatacaggcaaccatactatgttccaaaaaagttgggttacaaatacgtacccgtagcgggggacacgacagtgaggggatgagttatattagtcaggtgcctttcgtcatagtggatttaagaaatatgaggtcaattaaaatcgacgttcactcacaaactgcctgggttgaggcgggggccacattgggtgaagtatattactgggtcaatgagaagaacgagaatctttcactagcagccggttattgtcccacagtctgcgccggcggtcactttggcggcggcggatacggtcccttaatgagaaattacgggcttgccgcagacaatatcatagatgctcacttagttaatgttaacggaaaagtgttagaccgtaaaagcatgggggaggatctgttttgggcgcttagagggggaggggcagaatcatttggaataatagtggcatggaaaatcaggcttgtggctgttccaaagagtaccatgttctcagtaaagaaaataatggagatccatgagctagttaaacttgtgaataaatggcaaaacatagcctataaatatgataaggacttgctgcttatgactcatttcataaccagaaacattacggataaccaagggaagaacaaaacagccatccatacctactttagctccgttttcttgggtggtgtagacagcttagttgacctgatgaacaagagttttccggaactaggtatcaagaaggaagattgtagacaaatgtcctggattgataccataatcttttacagcggagtcgtcaattatgacactgacaacttcaacaaggaaattttattagataggagtgcgggtcaaaatggggccttcaagatcaaactagactacgttaaaaaacccattcctgaaagtgtttttgttcagattctggagaagctgtatgaagaagatattggcgcggggatgtacgtcctttatccgtacggcggcataatggatgagattagtgaaagcgccatccctttcccccacagagctggtatcctgtacgagttgtggtatatctgctcctgggagaaacaggaggataacgaaaagcacttaaattggattaggaatatctacaatttcatgacgccctacgtttccaagaaccccaggttggcctatttgaactacagggatcttgatattggaatcaacgaccccaaaaacccaaacaactacacccaggcaaggatttggggagagaagtacttcgggaagaacttcgacaggctagttaaggtgaaaacgctagttgatccaaataattttttcagaaacgaacagagtatccctcccttaccgcgtcataggcac

SEQ ID NO: 386 - DNA, 1548 bp, Artificial Sequence
  Synthetic
aatccaagagaaaatttcttgaagtgtttttctcagtatatcccgaataatgcgacgaaccttaacttagtatacactcagaacaaccctctatatatgagcgttctaaattctacaatccaaaacctaagatttacgtccgacacgactccgaaacccctagttatagtgacaccgtcacatgttagccatatacaggcaaccatactatgttccaaaaaagttgggttacaaatacgtacccgtagcgggggacacgacagtgaggggatgagttatattagtcaggtgcctttcgtcatagtggatttaagaaatatgaggtcaattaaaatcgacgttcactcacaaactgcctgggttgaggcgggggccacattgggtgaagtatattactgggtcaatgagaagaacgagaatctttcactagcagccggttattgtcccacagtctgcgccggcggtcactttggcggcggcggatacggtcccttaatgagaaattacgggcttgccgcagacaatatcatagatgctcacttagttaatgttcatggaaaagtgttagaccgtaaaagcatgggggaggatctgttttgggcgcttagagggggaggggcagaatcatttggaataatagtggcatggaaaatcaggcttgtggctgttccaaagagtaccatgttctcagtaaagaaaataatggagatccatgagctagttaaacttgtgaataaatggcaaaacatagcctataaatatgataaggacttgctgcttatgactcatttcataaccagaaacattacggataaccaagggaagaacaaaacagccatccatacctactttagctccgttttcttgggtggtgtagacagcttagttgacctgatgaacaagagttttccggaactaggtatcaagaagacagattgtagagaactttcctggattgataccataatcttttacagcggagtcgtcaattatgacactgacaacttcaacaaggaaattttattagataggagtgcgggtcaaaatggggccttcaagatcaaactagactacgttaaaaaacccattcctgaaagtgtttttgttcagattctggagaagctgtatgaagaagatattggcgcggggatgtacgtgctttatccgtacggcggcataatggatgagattagtgaaagcgccatccctttcccccacagagctggtatcctgtacgagttgtggtatatctgctcctgggagaaacaggaggataacgaaaagcacttaaattggattaggaatatctacaatttcatgacgccctacgtttccaagaaccccaggttggcctatttgaactacagggatcttgatattggaatcaacgaccccaaaaacccaaacaactacacccaggcaaggatttggggagagaagtacttcgggaagaacttcgacaggctagttaaggtgaaaacgctagttgatccaaataattttttcagaaacgaacagagtatccctcccttaccgcgtcataggcac

SEQ ID NO: 387 - DNA, 1548 bp, Artificial Sequence
  Synthetic
aatccaagagaaaatttcttgaagtgtttttctcagtatatcccgaataatgcgacgaaccttaacttagtatacactcagaacaaccctctatatatgagcgttctaaattctacaatccaaaacctaagatttacgtccgacacgactccgaaacccctagttatagtgacaccgtcacatgttagccatatacaggctaccatactatgttccaaaaaagttgggttacaaatacgtacccgtagcgggggacacgacagtgaggggatgagttatattagtcaggtgcctttcgtcatagtggatttaagaaatatgaggtcaattaaaatcgacgttcactcacaaactgcctgggttgaggcgggggccacattgggtgaagtatattactgggtcaatgagaagaacgagaatctttcactagcagccggttattgtcccacagtctgcgccggcggtcactttggcggcggcggatacggtcccttaatgagaaattacgggcttgccgcagacaatatcatagatgctcacttagttaatgttaacggaaaagtgttagaccgtaaaagcatgggggaggatctgttttgggcgcttagagggggaggggcagaatcatttggaataatagtggcatggaaaatcaggcttgtggctgttccaaagagtaccatgttctcagtaaagaaaataatggagatccatgagctagttaaacttgtgaataaatggcaaaacatagcctataaatatgataaggacttgctgcttatgactcatttcataaccagaaacattacggataaccaagggaagaacaaaacagccatccatacctactttagctccgttttcttgggtggtgtagacagcttagttgacctgatgaacaagagttttccggaactaggtatcaagaaggaagattgtagagaactttcctggattgataccataatcttttacagcggagtcgtcaattatgacactgacaacttcaacaaggaaattttattagataggagtgcgggtcaaaatggggccttcaagatcaaactagactacgttaaaaaacccattcctgaaagtgtttttgttcagattctggagaagctgtatgaagaagatattggcgcggggatgtacgtactttatccgtacggcggcataatggatgagattagtgaaagcgccatccctttcccccacagagctggtatcctgtacgagttgtggtatatctgctcctgggagaaacaggaggataacgaaaagcacttaaattggattaggaatatctacaatttcatgacgccctacgtttccaagaaccccaggttggcctatttgaactacagggatcttgatattggaatcaacgaccccaaaaacccaaacaactacacccaggcaaggatttggggagagaagtacttcgggaagaacttcgacaggctagttaaggtgaaaacgctagttgatccaaataattttttcagaaacgaacagagtatccctcccttaccgcgtcataggcac

SEQ ID NO: 388 - DNA, 1548 bp, Artificial Sequence
  Synthetic
aatccaagagaaaatttcttgaagtgtttttctcagtatatcccgaataatgcgacgaaccttaagttagtatacactcagaacaaccctctatatatgagcgttctaaattctacaatccacaacctaagatttacgtccgacacgactccgaaacccctagttatagtgacaccgtcacatgttagccatatacaggcaaccatactatgttccaaaaaagttgggttacaaatacgtacccgtagcgggggacacgacgctgaggggatgagttatattagtcaggtgcctttcgtcatagtggatttaagaaatatgaggtcaattaaaatcgacgttcactcacaaactgcctgggttgaggcgggggccacattgggtgaagtatattactgggtcaatgagaagaacgagaatctttcactagcagccggttattgtcccacagtctgcgccggcggtcactttggcggcggcggatacggtcccttaatgagaaattacgggcttgccgcagacaatatcatagatgctcacttagttaatgttcatggaaaagtgttagaccgtaaaagcatgggggaggatctgttttgggcgcttagagggggaggggcagaatcatttggaataatagtggcatggaaaatcaggcttgtggctgttccaaagagtaccatgttctcagtaaagaaaataatggagatccatgagctagttaaacttgtgaataaatggcaaaacatagcctataaatatgataaggacttgctgcttatgactcatttcataaccagaaacattacggataaccaagggaagaacaaaacagccatccatacctactttagctccgttttcttgggtggtgtagacagcttagttgacctgatgaacaagagttttccggaactaggtatcaagaagacagattgtagagaactttcctggattgataccataatcttttacagcggagtcgtcaattatgacactgacaacttcaacaaggaaattttattagataggagtgcgggtcaaaatggggccttcaagatcaaactagactacgttaaaaaacccattcctgaaagtgtttttgttcagattctggagaagctgtatgaagaagatattggcgcggggatgtacgctctttatccgtacggcggcataatggatgagattagtgaaagcgccatccctttcccccacagagctggtatcctgtacgagttgtggtatatctgctcctgggagaaacaggaggataacgaaaagcacttaaattggattaggaatatctacaatttcatgacgccctacgtttccaagaaccccaggttggcctatttgaactacagggatcttgatattggaatcaacgaccccaaaaacccaaacaactacacccaggcaaggatttggggagagaagtacttcgggaagaacttcgacaggctagttaaggtgaaaacgctagttgatccaaataattttttcagaaacgaacagagtatccctcccttaccgcgtcataggcac

SEQ ID NO: 389 - DNA, 1548 bp, Artificial Sequence
  Synthetic
aatccaagagaaaatttcttgaagtgtttttctcagtatatcccgaataatgcgacgaaccttaagttagtatacactcagaacaaccctctatatatgagcgttctaaattctacaatccacaacctaagatttacgtccgacacgactccgaaacccctagttatagtgacaccgtcacatgttagccatatacaggctaccatactatgttccaaaaaagttgggttacaaatacgtacccgtagcgggggacacgacgcagaggggatgagttatattagtcaggtgcctttcgtcatagtggatttaagaaatatgaggtcaattaaaatcgacgttcactcacaaactgcctgggttgaggcgggggccacattgggtgaagtatattactgggtcaatgagaagaacgagaatctttcactagcagccggttattgtcccacagtctgcgccggcggtcactttggcggcggcggatacggtcccttaatgagaaattacgggcttgccgcagacaatatcatagatgctcacttagttaatgttaacggaaaagtgttagaccgtaaaagcatgggggaggatctgttttgggcgcttagagggggaggggcagaatcatttggaataatagtggcatggaaaatcaggcttgtggctgttccaaagagtaccatgttctcagtaaagaaaataatggagatccatgagctagttaaacttgtgaataaatggcaaaacatagcctataaatatgataaggacttgctgcttatgactcatttcataaccagaaacattacggataaccaagggaagaacaaaacagccatccatacctactttagctccgttttcttgggtggtgtagacagcttagttgacctgatgaacaagagttttccggaactaggtatcaagaaggaagattgtagagaactttcctggattgataccataatcttttacagcggagtcgtcaattatgacactgacaacttcaacaaggaaattttattagataggagtgcgggtcaaaatggggccttcaagatcaaactagactacgttaaaaaacccattcctgaaagtgtttttgttcagattctggagaagctgtatgaagaagatattggcgcggggatgtacgctctttatccgtacggcggcataatggatgagattagtgaaagcgccatccctttcccccacagagctggtatcctgtacgagttgtggtatatctgctcctgggagaaacaggaggataacgaaaagcacttaaattggattaggaatatctacaatttcatgacgccctacgtttccaagaaccccaggttggcctatttgaactacagggatcttgatattggaatcaacgaccccaaaaacccaaacaactacacccaggcaaggatttggggagagaagtacttcgggaagaacttcgacaggctagttaaggtgaaaacgctagttgatccaaataattttttcagaaacgaacagagtatccctcccttaccgcgtcataggcac

SEQ ID NO: 390 - DNA, 1548 bp, Artificial Sequence
  Synthetic
aatccaagagaaaatttcttgaagtgtttttctcagtatatcccgaataatgcgacgaaccttaagttagtatacactcagaacaaccctctatatatgagcgttctaaattctacaatccacaacctaagatttacgtccgacacgactccgaaacccctagttatagtgacaccgtcacatgttagccatatacaggccaccatactatgttccaaaaaagttgggttacaaatacgtacccgtagcgggggacacgacagtgaggggatgagttatattagtcaggtgcctttcgtcatagtggatttaagaaatatgaggtcaattaaaatcgacgttcactcacaaactgcctgggttgaggcgggggccacattgggtgaagtatattactgggtcaatgagaagaacgagaatctttcactagcagccggttattgtcccacagtctgcgccggcggtcactttggcggcggcggatacggtcccttaatgagaaattacgggcttgccgcagacaatatcatagatgctcacttagttaatgttaacggaaaagtgttagaccgtaaaagcatgggggaggatctgttttgggcgcttagagggggaggggcagaatcatttggaataatagtggcatggaaaatcaggcttgtggctgttccaaagagtaccatgttctcagtaaagaaaataatggagatccatgagctagttaaacttgtgaataaatggcaaaacatagcctataaatatgataaggacttgctgcttatgactcatttcataaccagaaacattacggataaccaagggaagaacaaaacagccatccatacctactttagctccgttttcttgggtggtgtagacagcttagttgacctgatgaacaagagttttccggaactaggtatcaagaagacagattgtagagaactttcctggattgataccataatcttttacagcggagtcgtcaattatgacactgacaacttcaacaaggaaattttattagataggagtgcgggtcaaaatggggccttcaagatcaaactagactacgttaaaaaacccattcctgaaagtgtttttgttcagattctggagaagctgtatgaagaagatattggcgcggggatgtacgtgctttatccgtacggcggcataatggatgagattagtgaaagcgccatccctttcccccacagagctggtatcctgtacgagttgtggtatatctgctcctgggagaaacaggaggataacgaaaagcacttaaattggattaggaatatctacaatttcatgacgccctacgtttccaagaaccccaggttggcctatttgaactacagggatcttgatattggaatcaacgaccccaaaaacccaaacaactacacccaggcaaggatttggggagagaagtacttcgggaagaacttcgacaggctagttaaggtgaaaacgctagttgatccaaataattttttcagaaacgaacagagtatccctcccttaccgcgtcataggcac

SEQ ID NO: 391 - DNA, 1548 bp, Artificial Sequence
  Synthetic
aatccaagagaaaatttcttgaagtgtttttctcagtatatcccgaataatgcgacgaaccttaagttagtatacactcagaacaaccctctatatatgagcgttctaaattctacaatccacaacctaagatttacgtccgacacgactccgaaacccctagttatagtgacaccgtcacatgttagccatatacaggctaccatactatgttccaaaaaagttgggttacaaatacgtacccgtagcgggggacacgacagtgaggggatgagttatattagtcaggtgcctttcgtcatagtggatttaagaaatatgaggtcaattaaaatcgacgttcactcacaaactgcctgggttgaggcgggggccacattgggtgaagtatattactgggtcaatgagaagaacgagaatctttcactagcagccggttattgtcccacagtctgcgccggcggtcactttggcggcggcggatacggtcccttaatgagaaattacgggcttgccgcagacaatatcatagatgctcacttagttaatgttcatggaaaagtgttagaccgtaaaagcatgggggaggatctgttttgggcgcttagagggggaggggcagaatcatttggaataatagtggcatggaaaatcaggcttgtggctgttccaaagagtaccatgttctcagtaaagaaaataatggagatccatgagctagttaaacttgtgaataaatggcaaaacatagcctataaatatgataaggacttgctgcttatgactcatttcataaccagaaacattacggataaccaagggaagaacaaaacagccatccatacctactttagctccgttttcttgggtggtgtagacagcttagttgacctgatgaacaagagttttccggaactaggtatcaagaagacagattgtagagaactttcctggattgataccataatcttttacagcggagtcgtcaattatgacactgacaacttcaacaaggaaattttattagataggagtgcgggtcaaaatactgccttcaagatcaaactagactacgttaaaaaacccattcctgaaagtgtttttgttcagattctggagaagctgtatgaagaagatattggcgcggggatgtacgtcctttatccgtacggcggcataatggatgagattagtgaaagcgccatccctttcccccacagagctggtatcctgtacgagttgtggtatatctgctcctgggagaaacaggaggataacgaaaagcacttaaattggattaggaatatctacaatttcatgacgccctacgtttccaagaaccccaggttggcctatttgaactacagggatcttgatattggaatcaacgaccccaaaaacccaaacaactacacccaggcaaggatttggggagagaagtacttcgggaagaacttcgacaggctagttaaggtgaaaacgctagttgatccaaataattttttcagaaacgaacagagtatccctcccttaccgcgtcataggcac

SEQ ID NO: 392 - DNA, 1548 bp, Artificial Sequence
  Synthetic
aatccaagagaaaatttcttgaagtgtttttctcagtatatcccgaataatgcgacgaaccttaagttagtatacactcagaacaaccctctatatatgagcgttctaaattctacaatccaaaacctaagatttacgtccgacacgactccgaaacccctagttatagtgacaccgtcacatgttagccatatacaggctaccatactatgttccaaaaaagttgggttacaaatacgtacccgtagcgggggacacgacagtgaggggatgagttatattagtcaggtgcctttcgtcatagtggatttaagaaatatgaggtcaattaaaatcgacgttcactcacaaactgcctgggttgaggcgggggccacattgggtgaagtatattactgggtcaatgagaagaacgagaatctttcactagcagccggttattgtcccacagtctgcgccggcggtcactttggcggcggcggatacggtcccttaatgagaaattacgggcttgccgcagacaatatcatagatgctcacttagttaatgttaacggaaaagtgttagaccgtaaaagcatgggggaggatctgttttgggcgcttagagggggaggggcagaatcatttggaataatagtggcatggaaaatcaggcttgtggctgttccaaagagtaccatgttctcagtaaagaaaataatggagatccatgagctagttaaacttgtgaataaatggcaaaacatagcctataaatatgataaggacttgctgcttatgactcatttcataaccagaaacattacggataaccaagggaagaacaaaacagccatccatacctactttagctccgttttcttgggtggtgtagacagcttagttgacctgatgaacaagagttttccggaactaggtatcaagaaggaagattgtagagaaatgtcctggattgataccataatcttttacagcggagtcgtcaattatgacactgacaacttcaacaaggaaattttattagataggagtgcgggtcaaaatggggccttcaagatcaaactagactacgttaaaaaacccattcctgaaagtgtttttgttcagattctggagaagctgtatgaagaagatattggcgcggggatgtacgtactttatccgtacggcggcataatggatgagattagtgaaagcgccatccctttcccccacagagctggtatcctgtacgagttgtggtatatctgctcctgggagaaacaggaggataacgaaaagcacttaaattggattaggaatatctacaatttcatgacgccctacgtttccaagaaccccaggttggcctatttgaactacagggatcttgatattggaatcaacgaccccaaaaacccaaacaactacacccaggcaaggatttggggagagaagtacttcgggaagaacttcgacaggctagttaaggtgaaaacgctagttgatccaaataattttttcagaaacgaacagagtatccctcccttaccgcgtcataggcac

SEQ ID NO: 393 - DNA, 1548 bp, Artificial Sequence
  Synthetic
aatccaagagaaaatttcttgaagtgtttttctcagtatatcccgaataatgcgacgaaccttaacttagtatacactcagaacaaccctctatatatgagcgttctaaattctacaatccacaacctaagatttacgtccgacacgactccgaaacccctagttatagtgacaccgtcacatgttagccatatacaggccaccatactatgttccaaaaaagttgggttacaaatacgtacccgtagcgggggacacgacagtgaggggatgagttatattagtcaggtgcctttcgtcatagtggatttaagaaatatgaggtcaattaaaatcgacgttcactcacaaactgcctgggttgaggcgggggccacattgggtgaagtatattactgggtcaatgagaagaacgagaatctttcactagcagccggttattgtcccacagtctgcgccggcggtcactttggcggcggcggatacggtcccttaatgagaaattacgggcttgccgcagacaatatcatagatgctcacttagttaatgttaacggaaaagtgttagaccgtaaaagcatgggggaggatctgttttgggcgcttagagggggaggggcagaatcatttggaataatagtggcatggaaaatcaggcttgtggctgttccaaagagtaccatgttctcagtaaagaaaataatggagatccatgagctagttaaacttgtgaataaatggcaaaacatagcctataaatatgataaggacttgctgcttatgactcatttcataaccagaaacattacggataaccaagggaagaacaaaacagccatccatacctactttagctccgttttcttgggtggtgtagacagcttagttgacctgatgaacaagagttttccggaactaggtatcaagaagacagattgtagagaaatgtcctggattgataccataatcttttacagcggagtcgtcaattatgacactgacaacttcaacaaggaaattttattagataggagtgcgggtcaaaatggggccttcaagatcaaactagactacgttaaaaaacccattcctgaaagtgtttttgttcagattctggagaagctgtatgaagaagatattggcgcggggatgtacgtactttatccgtacggcggcataatggatgagattagtgaaagcgccatccctttcccccacagagctggtatcctgtacgagttgtggtatatctgctcctgggagaaacaggaggataacgaaaagcacttaaattggattaggaatatctacaatttcatgacgccctacgtttccaagaaccccaggttggcctatttgaactacagggatcttgatattggaatcaacgaccccaaaaacccaaacaactacacccaggcaaggatttggggagagaagtacttcgggaagaacttcgacaggctagttaaggtgaaaacgctagttgatccaaataattttttcagaaacgaacagagtatccctcccttaccgcgtcataggcac

SEQ ID NO: 394 - DNA, 1548 bp, Artificial Sequence
  Synthetic
aatccaagagaaaatttcttgaagtgtttttctcagtatatcccgaataatgcgacgaaccttaagttagtatacactcagaacaaccctctatatatgagcgttctaaattctacaatccaaaacctaagatttacgtccgacacgactccgaaacccctagttatagtgacaccgtcacatgttagccatatacaggccaccatactatgttccaaaaaagttgggttacaaatacgtacccgtagcgggggacacgacagtgaggggatgagttatattagtcaggtgcctttcgtcatagtggatttaagaaatatgaggtcaattaaaatcgacgttcactcacaaactgcctgggttgaggcgggggccacattgggtgaagtatattactgggtcaatgagaagaacgagaatctttcactagcagccggttattgtcccacagtctgcgccggcggtcactttggcggcggcggatacggtcccttaatgagaaattacgggcttgccgcagacaatatcatagatgctcacttagttaatgttaacggaaaagtgttagaccgtaaaagcatgggggaggatctgttttgggcgcttagagggggaggggcagaatcatttggaataatagtggcatggaaaatcaggcttgtggctgttccaaagagtaccatgttctcagtaaagaaaataatggagatccatgagctagttaaacttgtgaataaatggcaaaacatagcctataaatatgataaggacttgctgcttatgactcatttcataaccagaaacattacggataaccaagggaagaacaaaacagccatccatacctactttagctccgttttcttgggtggtgtagacagcttagttgacctgatgaacaagagttttccggaactaggtatcaagaagacagattgtagacaaatgtcctggattgataccataatcttttacagcggagtcgtcaattatgacactgacaacttcaacaaggaaattttattagataggagtgcgggtcaaaatggggccttcaagatcaaactagactacgttaaaaaacccattcctgaaagtgtttttgttcagattctggagaagctgtatgaagaagatattggcgcggggatgtacgtcctttatccgtacggcggcataatggatgagattagtgaaagcgccatccctttcccccacagagctggtatcctgtacgagttgtggtatatctgctcctgggagaaacaggaggataacgaaaagcacttaaattggattaggaatatctacaatttcatgacgccctacgtttccaagaaccccaggttggcctatttgaactacagggatcttgatattggaatcaacgaccccaaaaacccaaacaactacacccaggcaaggatttggggagagaagtacttcgggaagaacttcgacaggctagttaaggtgaaaacgctagttgatccaaataattttttcagaaacgaacagagtatccctcccttaccgcgtcataggcac

SEQ ID NO: 395 - DNA, 1548 bp, Artificial Sequence
  Synthetic
aatccaagagaaaatttcttgaagtgtttttctcagtatatcccgaataatgcgacgaaccttaagttagtatacactcagaacaaccctctatatatgagcgttctaaattctacaatccacaacctaagatttacgtccgacacgactccgaaacccctagttatagtgacaccgtcacatgttagccatatacaggctaccatactatgttccaaaaaagttgggttacaaatacgtacccgtagcgggggacacgacgccgaggggatgagttatattagtcaggtgcctttcgtcatagtggatttaagaaatatgaggtcaattaaaatcgacgttcactcacaaactgcctgggttgaggcgggggccacattgggtgaagtatattactgggtcaatgagaagaacgagaatctttcactagcagccggttattgtcccacagtctgcgccggcggtcactttggcggcggcggatacggtcccttaatgagaaattacgggcttgccgcagacaatatcatagatgctcacttagttaatgttcatggaaaagtgttagaccgtaaaagcatgggggaggatctgttttgggcgcttagagggggaggggcagaatcatttggaataatagtggcatggaaaatcaggcttgtggctgttccaaagagtaccatgttctcagtaaagaaaataatggagatccatgagctagttaaacttgtgaataaatggcaaaacatagcctataaatatgataaggacttgctgcttatgactcatttcataaccagaaacattacggataaccaagggaagaacaaaacagccatccatacctactttagctccgttttcttgggtggtgtagacagcttagttgacctgatgaacaagagttttccggaactaggtatcaagaaggaagattgtagagaactttcctggattgataccataatcttttacagcggagtcgtcaattatgacactgacaacttcaacaaggaaattttattagataggagtgcgggtcaaaatggggccttcaagatcaaactagactacgttaaaaaacccattcctgaaagtgtttttgttcagattctggagaagctgtatgaagaagatattggcgcggggatgtacgctctttatccgtacggcggcataatggatgagattagtgaaagcgccatccctttcccccacagagctggtatcctgtacgagttgtggtatatctgctcctgggagaaacaggaggataacgaaaagcacttaaattggattaggaatatctacaatttcatgacgccctacgtttccaagaaccccaggttggcctatttgaactacagggatcttgatattggaatcaacgaccccaaaaacccaaacaactacacccaggcaaggatttggggagagaagtacttcgggaagaacttcgacaggctagttaaggtgaaaacgctagttgatccaaataattttttcagaaacgaacagagtatccctcccttaccgcgtcataggcac

SEQ ID NO: 396 - DNA, 1548 bp, Artificial Sequence
  Synthetic
aatccaagagaaaatttcttgaagtgtttttctcagtatatcccgaataatgcgacgaaccttaagttagtatacactcagaacaaccctctatatatgagcgttctaaattctacaatccaaaacctaagatttacgtccgacacgactccgaaacccctagttatagtgacaccgtcacatgttagccatatacaggcaaccatactatgttccaaaaaagttgggttacaaatacgtacccgtagcgggggacacgacagtgaggggatgagttatattagtcaggtgcctttcgtcatagtggatttaagaaatatgaggtcaattaaaatcgacgttcactcacaaactgcctgggttgaggcgggggccacattgggtgaagtatattactgggtcaatgagaagaacgagaatctttcactagcagccggttattgtcccacagtctgcgccggcggtcactttggcggcggcggatacggtcccttaatgagaaattacgggcttgccgcagacaatatcatagatgctcacttagttaatgttcatggaaaagtgttagaccgtaaaagcatgggggaggatctgttttgggcgcttagagggggaggggcagaatcatttggaataatagtggcatggaaaatcaggcttgtggctgttccaaagagtaccatgttctcagtaaagaaaataatggagatccatgagctagttaaacttgtgaataaatggcaaaacatagcctataaatatgataaggacttgctgcttatgactcatttcataaccagaaacattacggataaccaagggaagaacaaaacagccatccatacctactttagctccgttttcttgggtggtgtagacagcttagttgacctgatgaacaagagttttccggaactaggtatcaagaagacagattgtagagaactttcctggattgataccataatcttttacagcggagtcgtcaattatgacactgacaacttcaacaaggaaattttattagataggagtgcgggtcaaaatggggccttcaagatcaaactagactacgttaaaaaacccattcctgaaagtgtttttgttcagattctggagaagctgtatgaagaagatattggcgcggggatgtacgttctttatccgtacggcggcataatggatgagattagtgaaagcgccatccctttcccccacagagctggtatcctgtacgagttgtggtatatctgctcctgggagaaacaggaggataacgaaaagcacttaaattggattaggaatatctacaatttcatgacgccctacgtttccaagaaccccaggttggcctatttgaactacagggatcttgatattggaatcaacgaccccaaaaacccaaacaactacacccaggcaaggatttggggagagaagtacttcgggaagaacttcgacaggctagttaaggtgaaaacgctagttgatccagataattttttcagaaacgaacagagtatccctcccttaccgcgtcataggcac

SEQ ID NO: 397 - DNA, 1548 bp, Artificial Sequence
  Synthetic
aatccaagagaaaatttcttgaagtgtttttctcagtatatcccgaataatgcgacgaaccttaagttagtatacactcagaacaaccctctatatatgagcgttctaaattctacaatccaaaacctaagatttacgtccgacacgactccgaaacccctagttatagtgacaccgtcacatgttagccatatacaggcaaccatactatgttccaaaaaagttgggttacaaatacgtacccgtagcgggggacacgacagtgaggggatgagttatattagtcaggtgcctttcgtcatagtggatttaagaaatatgaggtcaattaaaatcgacgttcactcacaaactgcctgggttgaggcgggggccacattgggtgaagtatattactgggtcaatgagaagaacgagaatctttcactagcagccggttattgtcccacagtctgcgccggcggtcactttggcggcggcggatacggtcccttaatgagaaattacgggcttgccgcagacaatatcatagatgctcacttagttaatgttaacggaaaagtgttagaccgtaaaagcatgggggaggatctgttttgggcgcttagagggggaggggcagaatcatttggaataatagtggcatggaaaatcaggcttgtggctgttccaaagagtaccatgttctcagtaaagaaaataatggagatccatgagctagttaaacttgtgaataaatggcaaaacatagcctataaatatgataaggacttgctgcttatgactcatttcataaccagaaacattacggataaccaagggaagaacaaaacagccatccatacctactttagctccgttttcttgggtggtgtagacgaattagttgacctgatgaacaagagttttccggaactaggtatcaagaagacagattgtagagaaatgtcctggattgataccataatcttttacagcggagtcgtcaattatgacactgacaacttcaacaaggaaattttattagataggagtgcgggtcaaaatggggccttcaagatcaaactagactacgttaaaaaacccattcctgaaagtgtttttgttcagattctggagaagctgtatgaagaagatattggcgcggggatgtacgtactttatccgtacggcggcataatggatgagattagtgaaagcgccatccctttcccccacagagctggtatcctgtacgagttgtggtatatctgctcctgggagaaacaggaggataacgaaaagcacttaaattggattaggaatatctacaatttcatgacgccctacgtttccaagaaccccaggttggcctatttgaactacagggatcttgatattggaatcaacgaccccaaaaacccaaacaactacacccaggcaaggatttggggagagaagtacttcgggaagaacttcgacaggctagttaaggtgaaaacgctagttgatccaaataattttttcagaaacgaacagagtatccctcccttaccgcgtcataggcac

SEQ ID NO: 398 - DNA, 1548 bp, Artificial Sequence
  Synthetic
aatccaagagaaaatttcttgaagtgtttttctcagtatatcccgaataatgcgacgaaccttaagttagtatacactcagaacaaccctctatatatgagcgttctaaattctacaatccacaacctaagatttacgtccgacacgactccgaaacccctagttatagtgacaccgtcacatgttagccatatacaggctaccatactatgttccaaaaaagttgggttacaaatacgtacccgtagcgggggacacgacgccgaggggatgagttatattagtcaggtgcctttcgtcatagtggatttaagaaatatgaggtcaattaaaatcgacgttcactcacaaactgcctgggttgaggcgggggccacattgggtgaagtatattactgggtcaatgagaagaacgagaatctttcactagcagccggttattgtcccacagtctgcgccggcggtcactttggcggcggcggatacggtcccttaatgagaaattacgggcttgccgcagacaatatcatagatgctcacttagttaatgttaacggaaaagtgttagaccgtaaaagcatgggggaggatctgttttgggcgcttagagggggaggggcagaatcatttggaataatagtggcatggaaaatcaggcttgtggctgttccaaagagtaccatgttctcagtaaagaaaataatggagatccatgagctagttaaacttgtgaataaatggcaaaacatagcctataaatatgataaggacttgctgcttatgactcatttcataaccagaaacattacggataaccaagggaagaacaaaacagccatccatacctactttagctccgttttcttgggtggtgtagacagcttagttgacctgatgaacaagagttttccggaactaggtatcaagaaggaagattgtagagaaatgtcctggattgataccataatcttttacagcggagtcgtcaattatgacactgacaacttcaacaaggaaattttattagataggagtgcgggtcaaaatggggccttcaagatcaaactagactacgttaaaaaacccattcctgaaagtgtttttgttcagattctggagaagctgtatgaagaagatattggcgcggggatgtacgctctttatccgtacggcggcataatggatgagattagtgaaagcgccatccctttcccccacagagctggtatcctgtacgagttgtggtatatctgctcctgggagaaacaggaggataacgaaaagcacttaaattggattaggaatatctacaatttcatgacgccctacgtttccaagaaccccaggttggcctatttgaactacagggatcttgatattggaatcaacgaccccaaaaacccaaacaactacacccaggcaaggatttggggagagaagtacttcgggaagaacttcgacaggctagttaaggtgaaaacgctagttgatccaaataattttttcagaaacgaacagagtatccctcccttaccgcgtcataggcac

SEQ ID NO: 399 - DNA, 1548 bp, Artificial Sequence
  Synthetic
aatccaagagaaaatttcttgaagtgtttttctcagtatatcccgaataatgcgacgaaccttaacttagtatacactcagaacaaccctctatatatgagcgttctaaattctacaatccaaaacctaagatttacgtccgacacgactccgaaacccctagttatagtgacaccgtcacatgttagccatatacagggcaccatactatgttccaaaaaagttgggttacaaatacgtacccgtagcgggggacacgacagtgaggggatgagttatattagtcaggtgcctttcgtcatagtggatttaagaaatatgaggtcaattaaaatcgacgttcactcacaaactgcctgggttgaggcgggggccacattgggtgaagtatattactgggtcaatgagaagaacgagaatctttcactagcagccggttattgtcccacagtctgcgccggcggtcactttggcggcggcggatacggtcccttaatgagaaattacgggcttgccgcagacaatatcatagatgctcacttagttaatgttaacggaaaagtgttagaccgtaaaagcatgggggaggatctgttttgggcgcttagagggggaggggcagaatcatttggaataatagtggcatggaaaatcaggcttgtggctgttccaaagagtaccatgttctcagtaaagaaaataatggagatccatgagctagttaaacttgtgaataaatggcaaaacatagcctataaatatgataaggacttgctgcttatgactcatttcataaccagaaacattacggataaccaagggaagaacaaaacagccatccatacctactttagctccgttttcttgggtggtgtagacagcttagttgacctgatgaacaagagttttccggaactaggtatcaagaaggaagattgtagagaactttcctggattgataccataatcttttacagcggagtcgtcaattatgacactgacaacttcaacaaggaaattttattagataggagtgcgggtcaaaatggggccttcaagatcaaactagactacgttaaaaaacccattcctgaaagtgtttttgttcagattctggagaagctgtatgaagaagatattggcgcggggatgtacgtactttatccgtacggcggcataatggatgagattagtgaaagcgccatccctttcccccacagagctggtatcctgtacgagttgtggtatatctgctcctgggagaaacaggaggataacgaaaagcacttaaattggattaggaatatctacaatttcatgacgccctacgtttccaagaaccccaggttggcctatttgaactacagggatcttgatattggaatcaacgaccccaaaaacccaaacaactacacccaggcaaggatttggggagagaagtacttcgggaagaacttcgacaggctagttaaggtgaaaacgctagttgatccaaataattttttcagaaacgaacagagtatccctcccttaccgcgtcataggcac

SEQ ID NO: 400 - DNA, 1548 bp, Artificial Sequence
  Synthetic
aatccaagagaaaatttcttgaagtgtttttctcagtatatcccgaataatgcgacgaaccttaagttagtatacactcagaacaaccctctatatatgagcgttctaaattctacaatccaaaacctaagatttacgtccgacacgactccgaaacccctagttatagtgacaccgtcacatgttagccatatacaggcaaccatactatgttccaaaaaagttgggttacaaatacgtacccgtagcgggggacacgacagtgaggggatgagttatattagtcaggtgcctttcgtcatagtggatttaagaaatatgaggtcaattaaaatcgacgttcactcacaaactgcctgggttgaggcgggggccacattgggtgaagtatattactgggtcaatgagaagaacgagaatctttcactagcagccggttattgtcccacagtctgcgccggcggtcactttggcggcggcggatacggtcccttaatgagaaattacgggcttgccgcagacaatatcatagatgctcacttagttaatgttaacggaaaagtgttagaccgtaaaagcatgggggaggatctgttttgggcgcttagagggggaggggcagaatcatttggaataatagtggcatggaaaatcaggcttgtggctgttccaaagagtaccatgttctcagtaaagaaaataatggagatccatgagctagttaaacttgtgaataaatggcaaaacatagcctataaatatgataaggacttgctgcttatgactcatttcataaccagaaacattacggataaccaagggaagaacaaaacagccatccatacctactttagctccgttttcttgggtggtgtagacagcttagttgacctgatgaacaagagttttccggaactaggtatcaagaagacagattgtagagaactttcctggattgataccataatcttttacagcggagtcgtcaattatgacactgacaacttcaacaaggaaattttattagataggagtgcgggtcaaaatggggccttcaagatcaaactagactacgttaaaaaacccattcctgaaagtgtttttgttcagattctggagaagctgtatgaagaagatattggcgcggggatgtacgtactttatccgtacggcggcataatggatgagattagtgaaagcgccatccctttcccccacagagctggtatcctgtacgagttgtggtatatctgctcctgggagaaacaggaggataacgaaaagcacttaaattggattaggaatatctacaatttcatgacgccctacgtttccaagaaccccaggttggcctatttgaactacagggatcttgatattggaatcaacgaccccaaaaacccaaacaactacacccaggcaaggatttggggagagaagtacttcgggaagaacttcgacaggctagttaaggtgaaaacgctagttgatccagataattttttcagaaacgaacagagtatccctcccttaccgcgtcataggcac

SEQ ID NO: 401 - DNA, 1548 bp, Artificial Sequence
  Synthetic
aatccaagagaaaatttcttgaagtgtttttctcagtatatcccgaataatgcgacgaaccttaacttagtatacactcagaacaaccctctatatatgagcgttctaaattctacaatccacaacctaagatttacgtccgacacgactccgaaacccctagttatagtgacaccgtcacatgttagccatatacaggcaaccatactatgttccaaaaaagttgggttacaaatacgtacccgtagcgggggacacgacagtgaggggatgagttatattagtcaggtgcctttcgtcatagtggatttaagaaatatgaggtcaattaaaatcgacgttcactcacaaactgcctgggttgaggcgggggccacattgggtgaagtatattactgggtcaatgagaagaacgagaatctttcactagcagccggttattgtcccacagtctgcgccggcggtcactttggcggcggcggatacggtcccttaatgagaaattacgggcttgccgcagacaatatcatagatgctcacttagttaatgttcatggaaaagtgttagaccgtaaaagcatgggggaggatctgttttgggcgcttagagggggaggggcagaatcatttggaataatagtggcatggaaaatcaggcttgtggctgttccaaagagtaccatgttctcagtaaagaaaataatggagatccatgagctagttaaacttgtgaataaatggcaaaacatagcctataaatatgataaggacttgctgcttatgactcatttcataaccagaaacattacggataaccaagggaagaacaaaacagccatccatacctactttagctccgttttcttgggtggtgtagacagcttagttgacctgatgaacaagagttttccggaactaggtatcaagaagacagattgtagagaaatgtcctggattgataccataatcttttacagcggagtcgtcaattatgacactgacaacttcaacaaggaaattttattagataggagtgcgggtcaaaatggggccttcaagatcaaactagactacgttaaaaaacccattcctgaaagtgtttttgttcagattctggagaagctgtatgaagaagatattggcgcggggatgtacgtactttatccgtacggcggcataatggatgagattagtgaaagcgccatccctttcccccacagagctggtatcctgtacgagttgtggtatatctgctcctgggagaaacaggaggataacgaaaagcacttaaattggattaggaatatctacaatttcatgacgccctacgtttccaagaaccccaggttggcctatttgaactacagggatcttgatattggaatcaacgaccccaaaaacccaaacaactacacccaggcaaggatttggggagagaagtacttcgggaagaacttcgacaggctagttaaggtgaaaacgctagttgatccaaataattttttcagaaacgaacagagtatccctcccttaccgcgtcataggcac

SEQ ID NO: 402 - DNA, 1548 bp, Artificial Sequence
  Synthetic
aatccaagagaaaatttcttgaagtgtttttctcagtatatcccgaataatgcgacgaaccttaacttagtatacactcagaacaaccctctatatatgagcgttctaaattctacaatccacaacctaagatttacgtccgacacgactccgaaacccctagttatagtgacaccgtcacatgttagccatatacaggcaaccatactatgttccaaaaaagttgggttacaaatacgtacccgtagcgggggacacgacagtgaggggatgagttatattagtcaggtgcctttcgtcatagtggatttaagaaatatgaggtcaattaaaatcgacgttcactcacaaactgcctgggttgaggcgggggccacattgggtgaagtatattactgggtcaatgagaagaacgagaatctttcactagcagccggttattgtcccacagtctgcgccggcggtcactttggcggcggcggatacggtcccttaatgagaaattacgggcttgccgcagacaatatcatagatgctcacttagttaatgttaacggaaaagtgttagaccgtaaaagcatgggggaggatctgttttgggcgcttagagggggaggggcagaatcatttggaataatagtggcatggaaaatcaggcttgtggctgttccaaagagtaccatgttctcagtaaagaaaataatggagatccatgagctagttaaacttgtgaataaatggcaaaacatagcctataaatatgataaggacttgctgcttatgactcatttcataaccagaaacattacggataaccaagggaagaacaaaacagccatccatacctactttagctccgttttcttgggtggtgtagacagcttagttgacctgatgaacaagagttttccggaactaggtatcaagaaggaagattgtagagaaatgtcctggattgataccataatcttttacagcggagtcgtcaattatgacactgacaacttcaacaaggaaattttattagataggagtgcgggtcaaaatggggccttcaagatcaaactagactacgttaaaaaacccattcctgaaagtgtttttgttcagattctggagaagctgtatgaagaagatattggcgcggggatgtacgtactttatccgtacggcggcataatggatgagattagtgaaagcgccatccctttcccccacagagctggtatcctgtacgagttgtggtatatctgctcctgggagaaacaggaggataacgaaaagcacttaaattggattaggaatatctacaatttcatgacgccctacgtttccaagaaccccaggttggcctatttgaactacagggatcttgatattggaatcaacgaccccaaaaacccaaacaactacacccaggcaaggatttggggagagaagtacttcgggaagaacttcgacaggctagttaaggtgaaaacgctagttgatccaaataattttttcagaaacgaacagagtatccctcccttaccgcgtcataggcac

SEQ ID NO: 403 - DNA, 1548 bp, Artificial Sequence
  Synthetic
aatccaagagaaaatttcttgaagtgtttttctcagtatatcccgaataatgcgacgaaccttaagttagtatacactcagaacaaccctctatatatgagcgttctaaattctacaatccacaacctaagatttacgtccgacacgactccgaaacccctagttatagtgacaccgtcacatgttagccatatacaggccaccatactatgttccaaaaaagttgggttacaaatacgtacccgtagcgggggacacgacagtgaggggatgagttatattagtcaggtgcctttcgtcatagtggatttaagaaatatgaggtcaattaaaatcgacgttcactcacaaactgcctgggttgaggcgggggccacattgggtgaagtatattactgggtcaatgagaagaacgagaatctttcactagcagccggttattgtcccacagtctgcgccggcggtcactttggcggcggcggatacggtcccttaatgagaaattacgggcttgccgcagacaatatcatagatgctcacttagttaatgttcatggaaaagtgttagaccgtaaaagcatgggggaggatctgttttgggcgcttagagggggaggggcagaatcatttggaataatagtggcatggaaaatcaggcttgtggctgttccaaagagtaccatgttctcagtaaagaaaataatggagatccatgagctagttaaacttgtgaataaatggcaaaacatagcctataaatatgataaggacttgctgcttatgactcatttcataaccagaaacattacggataaccaagggaagaacaaaacagccatccatacctactttagctccgttttcttgggtggtgtagacagcttagttgacctgatgaacaagagttttccggaactaggtatcaagaaggaagattgtagagaactttcctggattgataccataatcttttacagcggagtcgtcaattatgacactgacaacttcaacaaggaaattttattagataggagtgcgggtcaaaatggggccttcaagatcaaactagactacgttaaaaaacccattcctgaaagtgtttttgttcagattctggagaagctgtatgaagaagatattggcgcggggatgtacgtgctttatccgtacggcggcataatggatgagattagtgaaagcgccatccctttcccccacagagctggtatcctgtacgagttgtggtatatctgctcctgggagaaacaggaggataacgaaaagcacttaaattggattaggaatatctacaatttcatgacgccctacgtttccaagaaccccaggttggcctatttgaactacagggatcttgatattggaatcaacgaccccaaaaacccaaacaactacacccaggcaaggatttggggagagaagtacttcgggaagaacttcgacaggctagttaaggtgaaaacgctagttgatccaaataattttttcagaaacgaacagagtatccctcccttaccgcgtcataggcac

SEQ ID NO: 404 - DNA, 1548 bp, Artificial Sequence
  Synthetic
aatccaagagaaaatttcttgaagtgtttttctcagtatatcccgaataatgcgacgaaccttaacttagtatacactcagaacaaccctctatatatgagcgttctaaattctacaatccaaaacctaagatttacgtccgacacgactccgaaacccctagttatagtgacaccgtcacatgttagccatatacaggcaaccatactatgttccaaaaaagttgggttacaaatacgtacccgtagcgggggacacgacagtgaggggatgagttatattagtcaggtgcctttcgtcatagtggatttaagaaatatgaggtcaattaaaatcgacgttcactcacaaactgcctgggttgaggcgggggccacattgggtgaagtatattactgggtcaatgagaagaacgagaatctttcactagcagccggttattgtcccacagtctgcgccggcggtcactttggcggcggcggatacggtcccttaatgagaaattacgggcttgccgcagacaatatcatagatgctcacttagttaatgttcatggaaaagtgttagaccgtaaaagcatgggggaggatctgttttgggcgcttagagggggaggggcagaatcatttggaataatagtggcatggaaaatcaggcttgtggctgttccaaagagtaccatgttctcagtaaagaaaataatggagatccatgagctagttaaacttgtgaataaatggcaaaacatagcctataaatatgataaggacttgctgcttatgactcatttcataaccagaaacattacggataaccaagggaagaacaaaacagccatccatacctactttagctccgttttcttgggtggtgtagacagcttagttgacctgatgaacaagagttttccggaactaggtatcaagaaggaagattgtagagaaatgtcctggattgataccataatcttttacagcggagtcgtcaattatgacactgacaacttcaacaaggaaattttattagataggagtgcgggtcaaaatggggccttcaagatcaaactagactacgttaaaaaacccattcctgaaagtgtttttgttcagattctggagaagctgtatgaagaagatattggcgcggggatgtacgtactttatccgtacggcggcataatggatgagattagtgaaagcgccatccctttcccccacagagctggtatcctgtacgagttgtggtatatctgctcctgggagaaacaggaggataacgaaaagcacttaaattggattaggaatatctacaatttcatgacgccctacgtttccaagaaccccaggttggcctatttgaactacagggatcttgatattggaatcaacgaccccaaaaacccaaacaactacacccaggcaaggatttggggagagaagtacttcgggaagaacttcgacaggctagttaaggtgaaaacgctagttgatccaaataattttttcagaaacgaacagagtatccctcccttaccgcgtcataggcac

SEQ ID NO: 405 - DNA, 1548 bp, Artificial Sequence
  Synthetic
aatccaagagaaaatttcttgaagtgtttttctcagtatatcccgaataatgcgacgaaccttaagttagtatacactcagaacaaccctctatatatgagcgttctaaattctacaatccacaacctaagatttacgtccgacacgactccgaaacccctagttatagtgacaccgtcacatgttagccatatacaggctaccatactatgttccaaaaaagttgggttacaaatacgtacccgtagcgggggacacgacagtgaggggatgagttatattagtcaggtgcctttcgtcatagtggatttaagaaatatgaggtcaattaaaatcgacgttcactcacaaactgcctgggttgaggcgggggccacattgggtgaagtatattactgggtcaatgagaagaacgagaatctttcactagcagccggttattgtcccacagtctgcgccggcggtcactttggcggcggcggatacggtcccttaatgagaaattacgggcttgccgcagacaatatcatagatgctcacttagttaatgttcatggaaaagtgttagaccgtaaaagcatgggggaggatctgttttgggcgcttagagggggaggggcagaatcatttggaataatagtggcatggaaaatcaggcttgtggctgttccaaagagtaccatgttctcagtaaagaaaataatggagatccatgagctagttaaacttgtgaataaatggcaaaacatagcctataaatatgataaggacttgctgcttatgactcatttcataaccagaaacattacggataaccaagggaagaacaaaacagccatccatacctactttagctccgttttcttgggtggtgtagacagcttagttgacctgatgaacaagagttttccggaactaggtatcaagaagacagattgtagacaactttcctggattgataccataatcttttacagcggagtcgtcaattatgacactgacaacttcaacaaggaaattttattagataggagtgcgggtcaaaatggggccttcaagatcaaactagactacgttaaaaaacccattcctgaaagtgtttttgttcagattctggagaagctgtatgaagaagatattggcgcggggatgtacgtactttatccgtacggcggcataatggatgagattagtgaaagcgccatccctttcccccacagagctggtatcctgtacgagttgtggtatatctgctcctgggagaaacaggaggataacgaaaagcacttaaattggattaggaatatctacaatttcatgacgccctacgtttccaagaaccccaggttggcctatttgaactacagggatcttgatattggaatcaacgaccccaaaaacccaaacaactacacccaggcaaggatttggggagagaagtacttcgggaagaacttcgacaggctagttaaggtgaaaacgctagttgatccagataattttttcagaaacgaacagagtatccctcccttaccgcgtcataggcac

SEQ ID NO: 406 - DNA, 1548 bp, Artificial Sequence
  Synthetic
aatccaagagaaaatttcttgaagtgtttttctcagtatatcccgaataatgcgacgaaccttaacttagtatacactcagaacaaccctctatatatgagcgttctaaattctacaatccacaacctaagatttacgtccgacacgactccgaaacccctagttatagtgacaccgtcacatgttagccatatacagggcaccatactatgttccaaaaaagttgggttacaaatacgtacccgtagcgggggacacgacagtgaggggatgagttatattagtcaggtgcctttcgtcatagtggatttaagaaatatgaggtcaattaaaatcgacgttcactcacaaactgcctgggttgaggcgggggccacattgggtgaagtatattactgggtcaatgagaagaacgagaatctttcactagcagccggttattgtcccacagtctgcgccggcggtcactttggcggcggcggatacggtcccttaatgagaaattacgggcttgccgcagacaatatcatagatgctcacttagttaatgttaacggaaaagtgttagaccgtaaaagcatgggggaggatctgttttgggcgcttagagggggaggggcagaatcatttggaataatagtggcatggaaaatcaggcttgtggctgttccaaagagtaccatgttctcagtaaagaaaataatggagatccatgagctagttaaacttgtgaataaatggcaaaacatagcctataaatatgataaggacttgctgcttatgactcatttcataaccagaaacattacggataaccaagggaagaacaaaacagccatccatacctactttagctccgttttcttgggtggtgtagacagcttagttgacctgatgaacaagagttttccggaactaggtatcaagaagacagattgtagagaaatgtcctggattgataccataatcttttacagcggagtcgtcaattatgacactgacaacttcaacaaggaaattttattagataggagtgcgggtcaaaatggggccttcaagatcaaactagactacgttaaaaaacccattcctgaaagtgtttttgttcagattctggagaagctgtatgaagaagatattggcgcggggatgtacgtactttatccgtacggcggcataatggatgagattagtgaaagcgccatccctttcccccacagagctggtatcctgtacgagttgtggtatatctgctcctgggagaaacaggaggataacgaaaagcacttaaattggattaggaatatctacaatttcatgacgccctacgtttccaagaaccccaggttggcctatttgaactacagggatcttgatattggaatcaacgaccccaaaaacccaaacaactacacccaggcaaggatttggggagagaagtacttcgggaagaacttcgacaggctagttaaggtgaaaacgctagttgatccaaataattttttcagaaacgaacagagtatccctcccttaccgcgtcataggcac

SEQ ID NO: 407 - DNA, 1551 bp, Artificial Sequence
  Synthetic
aatcccagggagaactttcttaagtgtttcagtaaacatatcccaaataacgtggcgaatccgaaattagtatacacgcaacacgatcagctatatatgagcattctgaatagtaccattcaaaacttgcgctttacatcggacacaactccaaagcctttagtcatagttactccttcaaatgtatcccatattcaggctacaatcctctgctctaaaaaagttgggttgcaaatacgtactagatcaggaggccacgatgccgaaggtatgtcttatatctcccaagtgccattcgttgtcgtcgacttgaggaacatgcattctattaagattgatgtacactcccagaccgcatgggttgaagctggtgccacattaggtgaagtatactattggataaacgagaaaaatgaaaatttatcgtttcctggaggctattgtccaactgttggtgtcggtggtcatttctcaggcgggggctacggagcattgatgcgaaactacggactagcagctgataacattatagacgcccatctcgtgaatgtggatggtaaagttcttgatagaaagagcatgggtgaagatttgttttgggcgatcagaggcggtggaggggaaaactttggtattattgcggcttggaaaataaagctggtcccggttccctcgaaagtgacaatcttttctgtaaagaaaaatatggaaatacatgggttggtcaagttattcaataaatggcaaaacattgcttataagtatgataaagacctcgttctgatgactcattttattacgaaaaatattaccgacaatcacggtaagaataaaactacagtgcacggttacttttcttcaattttccatggtggcgttgactctctagtagatttaatgaacaaaagtttccctgagttagggatcaagaaaacggattgtaaagaattttcttggatcgacacaaccatattctattcgggtgttgttaactttaataccgcaaactttaaaaaggaaattttgttagatcgctctgctggaaagaaaacagcatttagtatcaaacttgactatgtaaagaaaccgatacccgagactgccatggttaagatacttgagaagctatacgaagaggatgtgggagctggcatgtacgttctctacccttacggcggtataatggatgaaatttcagaatccgcaatcccattcccacacagagcaggtattatgtatgaactgtggtatactgcctcatgggagaaacaagaagataacgaaaaacacattaattgggtccgtagcgtctacaatttcactacaccatatgtatcccaaaacccgagattggcttacttgaattatagagacttggatctaggaaaaaataatgaggaaagcccgaataattatacacaggcaaggatttggggcgagaagtatttcggcaagaacttcaacagattagtaaaagttaagaccaaagttgaccccaataacttttttagaaatgaacaaagtatccctccactcccaccacatcatcat

SEQ ID NO: 408 - DNA, 1548 bp, Artificial Sequence
  Synthetic
aatccaagagaaaatttcttgaagtgtttttctcagtatatcccgaataatgcgacgaaccttaagttagtatacactcagaacaaccctctatatatgagcgttctaaattctacaatccacaacctaagatttacgtccgacacgactccgaaacccctagttatagtgacaccgtcacatgttagccatatacaggccaccatactatgttccaaaaaagttgggttacaaatacgtacccgtagcgggggacacgacagtgaggggatgagttatattagtcaggtgcctttcgtcatagtggatttaagaaatatgaggtcaattaaaatcgacgttcactcacaaactgcctgggttgaggcgggggccacattgggtgaagtatattactgggtcaatgagaagaacgagaatctttcactagcagccggttattgtcccacagtctgcgccggcggtcactttggcggcggcggatacggtcccttaatgagaaattacgggcttgccgcagacaatatcatagatgctcacttagttaatgttaacggaaaagtgttagaccgtaaaagcatgggggaggatctgttttgggcgcttagagggggaggggcagaatcatttggaataatagtggcatggaaaatcaggcttgtggctgttccaaagagtaccatgttctcagtaaagaaaataatggagatccatgagctagttaaacttgtgaataaatggcaaaacatagcctataaatatgataaggacttgctgcttatgactcatttcataaccagaaacattacggataaccaagggaagaacaaaacagccatccatacctactttagctccgttttcttgggtggtgtagacagcttagttgacctgatgaacaagagttttccggaactaggtatcaagaaggaagattgtagagaaatgtcctggattgataccataatcttttacagcggagtcgtcaattatgacactgacaacttcaacaaggaaattttattagataggagtgcgggtcaaaatggggccttcaagatcaaactagactacgttaaaaaacccattcctgaaagtgtttttgttcagattctggagaagctgtatgaagaagatattggcgcggggatgtacgtactttatccgtacggcggcataatggatgagattagtgaaagcgccatccctttcccccacagagctggtatcctgtacgagttgtggtatatctgctcctgggagaaacaggaggataacgaaaagcacttaaattggattaggaatatctacaatttcatgacgccctacgtttccaagaaccccaggttggcctatttgaactacagggatcttgatattggaatcaacgaccccaaaaacccaaacaactacacccaggcaaggatttggggagagaagtacttcgggaagaacttcgacaggctagttaaggtgaaaacgctagttgatccaaataattttttcagaaacgaacagagtatccctcccttaccgcgtcataggcac

SEQ ID NO: 409 - DNA, 1548 bp, Artificial Sequence
  Synthetic
aatccaagagaaaatttcttgaagtgtttttctcagtatatcccgaataatgcgacgaaccttaagttagtatacactcagaacaaccctctatatatgagcgttctaaattctacaatccacaacctaagatttacgtccgacacgactccgaaacccctagttatagtgacaccgtcacatgttagccatatacaggcaaccatactatgttccaaaaaagttgggttacaaatacgtacccgtagcgggggacacgacagtgaggggatgagttatattagtcaggtgcctttcgtcatagtggatttaagaaatatgaggtcaattaaaatcgacgttcactcacaaactgcctgggttgaggcgggggccacattgggtgaagtatattactgggtcaatgagaagaacgagaatctttcactagcagccggttattgtcccacagtctgcgccggcggtcactttggcggcggcggatacggtcccttaatgagaaattacgggcttgccgcagacaatatcatagatgctcacttagttaatgttcatggaaaagtgttagaccgtaaaagcatgggggaggatctgttttgggcgcttagagggggaggggcagaatcatttggaataatagtggcatggaaaatcaggcttgtggctgttccaaagagtaccatgttctcagtaaagaaaataatggagatccatgagctagttaaacttgtgaataaatggcaaaacatagcctataaatatgataaggacttgctgcttatgactcatttcataaccagaaacattacggataaccaagggaagaacaaaacagccatccatacctactttagctccgttttcttgggtggtgtagacagcttagttgacctgatgaacaagagttttccggaactaggtatcaagaagacagattgtagagaaatgtcctggattgataccataatcttttacagcggagtcgtcaattatgacactgacaacttcaacaaggaaattttattagataggagtgcgggtcaaaatggggccttcaagatcaaactagactacgttaaaaaacccattcctgaaagtgtttttgttcagattctggagaagctgtatgaagaagatattggcgcggggatgtacgtcctttatccgtacggcggcataatggatgagattagtgaaagcgccatccctttcccccacagagctggtatcctgtacgagttgtggtatatctgctcctgggagaaacaggaggataacgaaaagcacttaaattggattaggaatatctacaatttcatgacgccctacgtttccaagaaccccaggttggcctatttgaactacagggatcttgatattggaatcaacgaccccaaaaacccaaacaactacacccaggcaaggatttggggagagaagtacttcgggaagaacttcgacaggctagttaaggtgaaaacgctagttgatccaaataattttttcagaaacgaacagagtatccctcccttaccgcgtcataggcac

SEQ ID NO: 410 - DNA, 1548 bp, Artificial Sequence
  Synthetic
aatccaagagaaaatttcttgaagtgtttttctcagtatatcccgaataatgcgacgaaccttaagttagtatacactcagaacaaccctctatatatgagcgttctaaattctacaatccacaacctaagatttacgtccgacacgactccgaaacccctagttatagtgacaccgtcacatgttagccatatacaggccaccatactatgttccaaaaaagttgggttacaaatacgtacccgtagcgggggacacgacagtgaggggatgagttatattagtcaggtgcctttcgtcatagtggatttaagaaatatgaggtcaattaaaatcgacgttcactcacaaactgcctgggttgaggcgggggccacattgggtgaagtatattactgggtcaatgagaagaacgagaatctttcactagcagccggttattgtcccacagtctgcgccggcggtcactttggcggcggcggatacggtcccttaatgagaaattacgggcttgccgcagacaatatcatagatgctcacttagttaatgttaacggaaaagtgttagaccgtaaaagcatgggggaggatctgttttgggcgcttagagggggaggggcagaatcatttggaataatagtggcatggaaaatcaggcttgtggctgttccaaagagtaccatgttctcagtaaagaaaataatggagatccatgagctagttaaacttgtgaataaatggcaaaacatagcctataaatatgataaggacttgctgcttatgactcatttcataaccagaaacattacggataaccaagggaagaacaaaacagccatccatacctactttagctccgttttcttgggtggtgtagacagcttagttgacctgatgaacaagagttttccggaactaggtatcaagaaggaagattgtagagaactttcctggattgataccataatcttttacagcggagtcgtcaattatgacactgacaacttcaacaaggaaattttattagataggagtgcgggtcaaaatggggccttcaagatcaaactagactacgttaaaaaacccattcctgaaagtgtttttgttcagattctggagaagctgtatgaagaagatattggcgcggggatgtacgtactttatccgtacggcggcataatggatgagattagtgaaagcgccatccctttcccccacagagctggtatcctgtacgagttgtggtatatctgctcctgggagaaacaggaggataacgaaaagcacttaaattggattaggaatatctacaatttcatgacgccctacgtttccaagaaccccaggttggcctatttgaactacagggatcttgatattggaatcaacgaccccaaaaacccaaacaactacacccaggcaaggatttggggagagaagtacttcgggaagaacttcgacaggctagttaaggtgaaaacgctagttgatccaaataattttttcagaaacgaacagagtatccctcccttaccgcgtcataggcac

SEQ ID NO: 411 - DNA, 1551 bp, Artificial Sequence
  Synthetic
aatcccagggagaactttcttaagtgtttcagtaaacatatcccaaataacgtggcgaatccgaaattagtatacacgcaacacgatcagctatattctagcattctgaatagtaccattcaaaacttgcgctttacttcggacacaactccaaagcctttagtcatagttactccttcaaatgtttcccatattcaggctacaatcctctgctctaaaaaagttgggttgcaaatacgtactagatcaggaggccacgatgccgaaggtatgtcttatatctcccaagtgccattcgttgtcgtcgacttgaggaacatgcattctattaagattgatgtacactcccagaccgcatgggttgaagctggtgccacattaggtgaagtatactattggataaacgagaaaaatgaaaatttatcgtttcctggaggctattgtccaactgttggtgtcggtggtcatttctcaggcgggggctacggagcattgatgcgaaactacggactagcagctgataacattatagacgcccatctcgtgaatgtggatggtaaagttcttgatagaaagagcatgggtgaagatttgttttgggcgatcagaggcggtggaggggaaaactttggtattattgcggcttggaaaataaagctggtccccgttccctcgaaagtgacaatcttttctgtaaagaaaaatatggaaatacatgggttggtcaagttattcaataaatggcaaaacattgcttataagtatgataaagacctcgttctgatgactcattttattacgaaaaatattaccgacaatcacggtaagaataaaactacagtgcacggttacttttcttcaattttccatggtggcgttgactctctagtagatttaatgaacaaaagtttccctgagttagggatcaagaaaacggattgtaaagaattttcttggatcgacacaaccatattctattcgggtgttgttaactttaataccgcaaactttaaaaaggaaattttgttagatcgctctgctggaaagaaaacagcatttagtatcaaacttgactatgtaaagaaaccgatacccgagactgccatggttaagatacttgagaagctatacgaagaggatgtgggagctggcatgtacgttctctacccttacggcggtataatggatgaaatttcagaatccgcaatcccattcccacacagagcaggtattatgtatgaactgtggtatactgcctcatgggagaaacaagaagataacgaaaaacacattaattgggtccgtagcgtctacaatttcactacaccatatgtatcccaaaacccgagattggcttacttgaattatagagacttggatctaggaaaaaataatgaggccagcccgaataattatacacaggcaaggatttggggcgagaagtatttcggcaagaacttcaacagattagtaaaagttaagaccaaagttgaccccaataacttttttagaaatgaacaaagtatccctccactcccaccacatcatcat

SEQ ID NO: 412 - DNA, 1551 bp, Artificial Sequence
  Synthetic
aatccccaggagaactttcttaagtgtttcagtcaatacatcccaaataacgtggcgaatccgaaattagtatacacgcaacacgatcagctatatatgagcattctgaatagtaccattcaaaacttgcgctttacttcggacacaactccaaagcctttagtcatagttactccttcaaatgtttcccatattcaggctacaatcctctgctctaaaaaagttgggttgcaaatacgtactagatcaggaggccacgatgccgaaggtatgtcttatatctcccaagtgccattcgttattgtcgacttgaggaacatgcattctattaagattgatgtacactcccagaccgcatgggttgaagctggtgccacattaggtgaagtatactattggataaacgagaaaaatgaaaatttatcgtttcctggaggctattgtccaactgttggtgtcggtggtcatttctcaggcgggggctacggagcattgatgcgaaactacggactagcagctgataacattatagacgcccatctcgtgaatgtggatggtaaagttcttgatagaaagagcatgggtgaagatttgttttgggcgatcagaggcggtggaggggaaaactttggtattattgcggcttggaaaataaagctggtcgcagttccctcgaaaagcacaatcttttctgtaaagaaaaatatggaaatacatgggttggtcaagttattcaataaatggcaaaacattgcttataagtatgataaagacctcctactgatgactcattttattacgaggaatattaccgacaatcacggtaagaataaaactacagtgcacggttacttttcttcaattttccatggtggcgttgactctctagtagatttaatgaacaaaagtttccctgagttagggatcaagaaaacggattgtaaagaattatcttggatcgacacaaccatattctattcgggtgttgttaactataataccgcaaactttaaaaaggaaattttgttagatcgctctgctggaaagaaaacagcatttagtatcaaacttgactatgtaaagaaaccgatacccgagactgccatggttaagatacttgagaagctatacgaagaggatgtgggagtgggcatgtacgttctctaccctttcggcggtataatggatgaaatttcagaatccgcaatcccattcccacacagagcaggtattatgtatgaactgtggtatactgcctcatgggagaaacaagaagataacgaaaaacacattaattgggtccgtagcgtctacaatttcactacaccatatgtatcccaaaacccgagattggcttacttgaattatagagacttggatctaggaaaaaccaatccagaaagcccgaataattatacacaggcaaggatttggggcgagaagtatttcggcaagaacttcaacagattagtaaaagttaagaccaaagttgaccccaataacttttttagaaatgaacaaagtatccctccactcccaccacatcatcat

SEQ ID NO: 413 - DNA, 1551 bp, Artificial Sequence
  Synthetic
aatccccaagagaactttcttaagtgtttcagtaaacatatcccaaataacgtggcgaatccgaaattagtatacacgcaacacgatcagctatatatgagcattctgaatagtaccattcaaaacttgcgctttacttcggacacaactccaaagcctttagtcatagttactccttcaaatgtctcccatattcaggctacaatcctctgctctaaaaaagttgggttgcaaatacgtactagatcaggaggccacgatgccgaaggtatgtcttatatctcccaagtgccattcgttgtcgtcgacttgaggaacatgcattctattaagattgatgtacactcccagaccgcatgggttgaagctggtgccacattaggtgaagtatactattggataaacgagaaaaatgaaaatttatcgtttcctggaggctattgtccaactgttggtgtcggtggtcatttctcaggcgggggctacggagcattgatgcgaaactacggactagcagctgataacattatagacgcccatctcgtgaatgtggatggtaaagttcttgatagaaagagcatgggtgaagatttgttttgggcgatcagaggcggtggaggggaaaactttggtattattgcggcttggaaaataaagctggtcgatgttccctcgaaagtaacaatcttttctgtaaagaaaaatatggaaatacatgggttggtcaagttattcaataaatggcaaaacattgcttataagtatgataaagacctcgttctgatgactcattttattacgaaaaatattaccgacaatcacggtaagaataaaactacagtgcacggttacttttcttcaattttccatggtggcgttgactctctagtagatttaatgaacaaaagtttccctgagttagggatcaagaaaacggattgtaaagaattttcttggatcgacacaaccatattctattcgggtgttgttaactttaataccgcaaactttaaaaaggaaattttgttagatcgctctgctggaaagaaaacagcatttagtatcaaacttgactatgtaaagaaaccgatacccgagactgccatggttaagatacttgagaagctatacgaagaggatgtgggagctggcatgtacgttctctacccttacggcggtataatggaagaaatttcagaatccgcaatcccattcccacacagagcaggtattatgtatgaactgtggtatactgcctcatgggagaaacaagaagataacgaaaaacacattaattgggtccgtagcgtctacaatttcactacaccatatgtatcccaaaacccgagattggcttacttgaattatagagacttggatctaggaaaaaataatgaagccagcccgaataattatacacaggcaaggatttggggcgagaagtatttcggcaagaacttcaacagattagtaaaagttaagaccaaagttgaccccaataacttttttagaaatgaacaaagtatccctccactcccaccacatcatcat

SEQ ID NO: 414 - DNA, 1551 bp, Artificial Sequence
  Synthetic
aatcccagggagaactttcttaagtgtttcagtaaacatatcccaaataacgtggcgaatccgaaattagtatacacgcaacacgatcagctatatatgagcattctgaatagtaccattcaaaacttgcgctttacttcggacacaactccaaagcctttagtcatagttactccttcaaatgtttcccatattcaggctacaatcctctgctctaaaaaagttgggttgcaaatacgtactagatcaggaggccacgatgccgaaggtatgtcttatatctcccaagtgccattcgttgtcgtcgacttgaggaacatgcattctattaagattgatgtacactcccagaccgcatgggttgaagctggtgccacattaggtgaagtatactattggataaacgagaaaaatgaaaatttatcgtttcctggaggctattgtccaactgttggtgtcggtggtcatttctcaggcgggggctacggagcattgatgcgaaactacggactagcagctgataacattatagacgcccatctcgtgaatgtggatggtaaagttcttgatagaaagagcatgggtgaagatttgttttgggcgatcagaggcggtggaggggaaaactttggtattattgcggcttggaaaataaagctggtcccggttccctcgaaaagcacaatcttttctgtaaagaaaaatatggaaatacatgggttggtcaagttattcaataaatggcaaaacattgcttataagtatgataaagacctcgttctgatgactcattttattacgaaaaatattaccgacaatcacggtaagaataaaactacagtgcacggttacttttcttcaattttccatggtggcgttgactctctagtagatttaatgaacaaaagtttccctgagttagggatcaagaaaacggattgtaaagaattttcttggatcgacacaaccatattctattcgggtgttgttaactttaataccgcaaactttaaaaaggaaattttgttagatcgctctgctggaaagaaaacagcatttagtatcaaacttgactatgtaaagaaaccgatacccgagactgccatggttaagatacttgagaagctatacgaagaggatgtgggagctggcatgtacgttctctacccttacggcggtataatggaagaaatttcagaatccgcaatcccattcccacacagagcaggtattatgtatgaactgtggtatactgcctcatgggagaaacaagaagataacgaaaaacacattaattgggtccgtagcgtctacaatttcactacaccatatgtatcccaaaacccgagattggcttacttgaattatagagacttggatctaggaaaaaccaatgaagccagcccgaataattatacacaggcaaggatttggggcgagaagtatttcggcaagaacttcaacagattagtaaaagttaagaccaaagttgaccccaataacttttttagaaatgaacaaagtatccctccactcccaccacatcatcat

SEQ ID NO: 415 - DNA, 1551 bp, Artificial Sequence
  Synthetic
aatccccaggagaactttcttaagtgtttcagtcaatacatcccaacgaacgtgactaatgcgaaattagtatacacgcaacacgatcagttttatagcagcattctgaatagtaccattcaaaacttgcgctttacatcggacacaactccaaagcctttagtcataataactcctctaaatgtttcccatattcaggggacaatcctctgctctaaaaaagttgggttgcaaatacgtactagatcaggaggccacgatgccgaaggtatgtcttatatctcccaagtgccattcgttgtcgtcgacttgaggaacatgcattctattaagattgatgtagaatcccagaccgcatgggttgaagctggtgccacattaggtgaagtatactattggataaacgagaaaaatgaaaatttatcgtttcctggaggctattgtccaactgttggtgtcggtggtcatttctcaggcgggggctacggagcattgatgcgaaactacggactagcagctgataacattatagacgcccatctcgtgaatgtggatggtaaagttcttgatagaaagagcatgggtgaagatttgttttgggcgatcagaggcggtggaggggaaaactttggtattattgcggcttggaaaataaagctggtcgcagttccctcgaaagttacaatcttttctgtaaagaaaaatatggaaatacatgggttggtcaagttattcaataaatggcaaaacattgcttataagtatgataaagacctcgttctgatgactcattttattacgaaaaatattaccgacaatcacggtaagaataaaactacagtgcacggttacttttcttcaattttccatggtggcgttgactctctagtagatttaatgaacaaaagtttccctgagttagggatcaagaaaacggattgtaaagaattttcttggatcgacacaaccatattctattcgggtgttgttaactttaataccgcaaactttaaaaaggaaattttgttagatcgctctgctggaaagaaaacagcatttagtatcaaacttgactatgtaaagaaaccgatacccgagactgccatggttaagatacttgagaagctatacgaagaggatgtgggagctggcatgtacgttctctacccttacggcggtataatggatgaaatttcagaatccgcaatcccattcccacacagagcaggtattatgtatgaactgtggtatactgcctcatgggagaaacaagaagataacgaaaaacacattaattgggtccgtagcgtctacaatttcactacaccatatgtatcccaaaacccgagattggcttacttgaattatagagacttggatctaggaaaaaataatgaagccagcccgaataattatacacaggcaaggatttggggcgagaagtatttcggcaagaacttcaacagattagtaaaagttaagaccaaagttgaccccaataacttttttagaaatgaacaaagtatccctccactcccactaaggcatcat

SEQ ID NO: 416 - DNA, 1551 bp, Artificial Sequence
  Synthetic
aatccccaggagaactttcttaagtgtttcagtcaatatatcccaaataaccctgcgaatccgaaattagtatacacgcaacacgatcagctatatatgagcattctgaatagtaccattcaaaacttgcgctttacatcggacacaactccaaagcctttagtcatagttactccttcaaatgtgtcccatattcaggctacaatcctctgctctaaaaaagttgggttgcaaatacgtactagatcaggaggccacgatgccgaaggtatgtcttatatctcccaagtgccattcgttattgtcgacttgaggaacatgcattctattaagattgatgtacactcccagaccgcatgggttgaagctggtgccacattaggtgaagtatactattggataaacgagaaaaatgaaaatttatcgtttcctggaggctattgtccaactgttggtgtcggtggtcatttctcaggcgggggctacggagcattgatgcgaaactacggactagcagctgataacattatagacgcccatctcgtgaatgtggatggtaaagttcttgatagaaagagcatgggtgaagatttgttttgggcgatcagaggcggtggaggggaaaactttggtattattgcggcttggaaaataaagctggtcgcagttccctcgaaaagcacaatcttttctgtaaagaaaaatatggaaatacatgggttggtcaagttattcaataaatggcaaaacattgcttataagtatgataaagacctccttctgatgactcattttattacgcgtaatattaccgacaatcacggtaagaataaaactacagtgcacggttacttttcttcaattttccatggtggcgttgactctctagtagatttaatgaacaaaagtttccctgagttagggatcaagaaagaagattgtaaagaactttcttggatcgacacaaccatattctattcgggtgttgttaactataataccgcaaactttaaaaaggaaattttgttagatcgctctgctggaaagaaaacagcatttagtatcaaacttgactatgtaaagaaaccgatacccgagactgccatggttaagatacttgagaagctatacgaagaggatgtgggagttggcatgtacgttctctacccttacggcggtataatggatgaaatttcagaatccgcaatcccattcccacacagagcaggtattatgtatgaactgtggtatactgcctcatgggagaaacaagaagataacgaaaaacacattaattgggtccgtagcgtctacaatttcactacaccatatgtatcccaaaacccgagattggcttacttgaattatagagacttggatctaggaaaaaccaatcccgaaagcccgaataattatacacaggcaaggatttggggcgagaagtatttcggcaagaacttcaacagattagtaaaagttaagaccaaagttgaccccaataacttttttagaaatgaacaaagtatccctccactcccaccacatcatcat

SEQ ID NO: 417 - DNA, 1551 bp, Artificial Sequence
  Synthetic
aatcccagggagaactttcttaagtgtttcagtaaacatatcccaaataacgtggcgaatccgaaattagtatacacgcaacacgatcagctatatagcagcattctgaatagtaccattcaaaacttgcgctttacttcggacacaactccaaagcctttagtcatagttactccttcaaatgtttcccatattcaggctacaatcctctgctctaaaaaagttgggttgcaaatacgtactagatcaggaggccacgatgccgaaggtatgtcttatatctcccaagtgccattcgttgtcgtcgacttgaggaacatgcattctattaagattgatgtacactcccagaccgcatgggttgaagctggtgccacattaggtgaagtatactattggataaacgagaaaaatgaaaatttatcgtttcctggaggctattgtccaactgttggtgtcggtggtcatttctcaggcgggggctacggagcattgatgcgaaactacggactagcagctgataacattatagacgcccatctcgtgaatgtggatggtaaagttcttgatagaaagagcatgggtgaagatttgttttgggcgatcagaggcggtggaggggaaaactttggtattattgcggcttggaaaataaagctggtcgacgttccctcgaaagtaacaatcttttctgtaaagaaaaatatggaaatacatgggttggtcaagttattcaataaatggcaaaacattgcttataagtatgataaagacctcgttctgatgactcattttattacgaaaaatattaccgacaatcacggtaagaataaaactacagtgcacggttacttttcttcaattttccatggtggcgttgactctctagtagatttaatgaacaaaagtttccctgagttagggatcaagaaaacggattgtaaagaattttcttggatcgacacaaccatattctattcgggtgttgttaactttaataccgcaaactttaaaaaggaaattttgttagatcgctctgctggaaagaaaacagcatttagtatcaaacttgactatgtaaagaaaccgatacccgagactgccatggttaagatacttgagaagctatacgaagaggatgtgggagctggcatgtacgttctctacccttacggcggtataatggaagaaatttcagaatccgcaatcccattcccacacagagcaggtattatgtatgaactgtggtatactgcctcatgggagaaacaagaagataacgaaaaacacattaattgggtccgtagcgtctacaatttcactacaccatatgtatccaagaacccgagattggcttacttgaattatagagacttggatctaggaaaaaacaatgaagaaagcccgaataattatacacaggcaaggatttggggcgagaagtatttcggcaagaacttcaacagattagtaaaagttaagaccaaagttgaccccaataacttttttagaaatgaacaaagtatccctccactcccaccacatcatcat

SEQ ID NO: 418 - DNA, 1551 bp, Artificial Sequence
  Synthetic
aatccccaggagaactttcttaagtgtttcagtaaacatatcccaaataacgtggcgaatccgaaattagtatacacgcaaaacgatcagctatatatgagcattctgaatagtaccattcaaaacttgcgctttacatcggacacaactccaaagcctttagtcatagttactccttcaaatgtttcccatattcaggctacaatcctctgctctaaaaaagttgggttgcaaatacgtactagatcaggaggccacgatgccgaaggtatgtcttatatctcccaagtgccattcgttgtcgtcgacttgaggaacatgcattctattaagattgatgtacactcccagaccgcatgggttgaagctggtgccacattaggtgaagtatactattggataaacgagaaaaatgaaaatttatcgtttcctggaggctattgtccaactgttggtgtcggtggtcatttctcaggcgggggctacggagcattgatgcgaaactacggactagcagctgataacattatagacgcccatctcgtgaatgtggatggtaaagttcttgatagaaagagcatgggtgaagatttgttttgggcgatcagaggcggtggaggggaaaactttggtattattgcggcttggaaaataaagctggtcccggttccctcgaaagtaacaatcttttctgtaaagaaaaatatggaaatacatgggttggtcaagttattcaataaatggcaaaacattgcttataagtatgataaagacctcgttctgatgactcattttattacgaaaaatattaccgacaatcacggtaagaataaaactacagtgcacggttacttttcttcaattttccatggtggcgttgactctctagtagatttaatgaacaaaagtttccctgagttagggatcaagaaaacggattgtaaagaattttcttggatcgacacaaccatattctattcgggtgttgttaactttaataccgcaaactttaaaaaggaaattttgttagatcgctctgctggaaagaaaacagcatttagtatcaaacttgactatgtaaagaaaccgatacccgagactgccatggttaagatacttgagaagctatacgaagaggatgtgggagctggcatgtacgttctctacccttacggcggtataatggaagaaatttcagaatccgcaatcccattcccacacagagcaggtattatgtatgaactgtggtatactgcctcatgggagaaacaagaagataacgaaaaacacattaattgggtccgtagcgtctacaatttcactacaccatatgtatccaagaacccgagattggcttacttgaattatagagacttggatctaggaaaaaataatgaagaaagcccgaataattatacacaggcaaggatttggggcgagaagtatttcggcaagaacttcaacagattagtaaaagttaagaccaaagttgaccccaataacttttttagaaatgaacaaagtatccctccactcccaccacatcatcat

SEQ ID NO: 419 - DNA, 1551 bp, Artificial Sequence
  Synthetic
aatccccaggagaactttcttaagtgtttcagtcaatacatcccaaataaccctgcgaatccgaaattaatttacacgcaaaatgattcactatatagcagcattctgaatagtaccattcaaaacttgcgctttacttcggacacaactccaaagcctttagtcatagttactccttcaaatgtatcccatattcaggctacaatcctctgctctaaaaaagttgggttgcaaatacgtactagatcaggaggccacgatgccgaaggtatgtcttatatctcccaagtgccattcgttattgtcgacttgaggaacatgcattctattaagattgatgtacactcccagaccgcatgggttgaagctggtgccacattaggtgaagtatactattggataaacgagaaaaatgaaaatttatcgtttcctggaggctattgtccaactgttggtgtcggtggtcatttctcaggcgggggctacggagcattgatgcgaaactacggactagcagctgataacattatagacgcccatctcgtgaatgtggatggtaaagttcttgatagaaagagcatgggtgaagatttgttttgggcgatcagaggcggtggaggggaaaactttggtattattgcggcttggaaaataaagctggtcgcagttccctcgaaagtaacaatcttttctgtaaagaaaaatatggaaatacatgggttggtcaagttattcaataaatggcaaaacattgcttataagtatgataaagacctcttactgatgactcattttattacgaggaatattaccgacaatcacggtaagaataaaactacagtgcacggttacttttcttcaattttccatggtggcgttgactctctagtagatttaatgaacaaaagtttccctgagttagggatcaagaaaacggattgtaaagaattgtcttggatcgacacaaccatattctattcgggtgttgttaactataataccgcaaactttaaaaaggaaattttgttagatcgctctgctggaaagaaaacagcatttagtatcaaacttgactatgtaaagaaaccgatacccgagactgccatggttaagatacttgagaagctatacgaagaggatgtgggagtaggcatgtacgttctctacccttacggcggtataatggatgaaatttcagaatccgcaatcccattcccacacagagcaggtattatgtatgaactgtggtatactgcctcatgggagaaacaagaagataacgaaaaacacattaattgggtccgtagcgtctacaatttcactacaccatatgtatccaaaaacccgagattggcttacttgaattatagagacttggatctaggaaaaaataatcccgaaagcccgaataattatacacaggcaaggatttggggcgagaagtatttcggcaagaacttcaacagattagtaaaagttaagaccaaagttgaccccaataacttttttagaaatgaacaaagtatccctccactcccaccacatcatcat

SEQ ID NO: 420 - DNA, 1551 bp, Artificial Sequence
  Synthetic
aatccccaggagaactttcttaagtgtttcagtcaatatatcccaacgaacgtgaccaatgcaaaattagtatacacgcaacacgatcagttttattccagcattctgaatagtaccattcaaaacttgcgctttacatcggacacaactccaaagcctttagtcataatcactcctctaaatgtttcccatattcaggggacaatcctctgctctaaaaaagttgggttgcaaatacgtactagatcaggaggccacgatgccgaaggtatgtcttatatctcccaagtgccattcgttgtcgtcgacttgaggaacatgcattctattaagattgatgtacactcccagaccgcatgggttgaagctggtgccacattaggtgaagtatactattggataaacgagaaaaatgaaaatttatcgtttcctggaggctattgtccaactgttggtgtcggtggtcatttctcaggcgggggctacggagcattgatgcgaaactacggactagcagctgataacattatagacgcccatctcgtgaatgtggatggtaaagttcttgatagaaagagcatgggtgaagatttgttttgggcgatcagaggcggtggaggggaaaactttggtattattgcggcttggaaaataaagctggtcgcagttccctcgaaagtaacaatcttttctgtaaagaaaaatatggaaatacatgggttggtcaagttattcaataaatggcaaaacattgcttataagtatgataaagacctcgttctgatgactcattttattacgaaaaatattaccgacaatcacggtaagaataaaactacagtgcacggttacttttcttcaattttccatggtggcgttgactctctagtagatttaatgaacaaaagtttccctgagttagggatcaagaaagaggattgtaaagaattttcttggatcgacacaaccatattctattcgggtgttgttaactttaataccgcaaactttaaaaaggaaattttgttagatcgctctgctggaaagaaaacagcatttagtatcaaacttgactatgtaaagaaaccgatacccgagactgccatggttaagatacttgagaagctatacgaagaggatgtgggagctggcatgtacgttctctacccttacggcggtataatggaagaaatttcagaatccgcaatcccattcccacacagagcaggtattatgtatgaactgtggtatactgcctcatgggagaaacaagaagataacgaaaaacacattaattgggtccgtagcgtctacaatttcactacaccatatgtatcccaaaacccgagattggcttacttgaattatagagacttggatctaggaaaaaataatgaagaaagcccgaataattatacacaggcaaggatttggggcgagaagtatttcggcaagaacttcaacagattagtaaaagttaagaccaaagttgaccccaataacttttttagaaatgaacaaagtatccctccactcccacttaggcatcat

SEQ ID NO: 421 - DNA, 1551 bp, Artificial Sequence
  Synthetic
aatcccagggagaactttcttaagtgtttcagtaaacatatcccaaataacgtggcgaatccgaaattagtatacacgcaacacgatcagctatattcaagcattctgaatagtaccattcaaaacttgcgctttatatcggacacaactccaaagcctttagtcatagttactccttcaaatgtttcccatattcaggctacaatcctctgctctaaaaaagttgggttgcaaatacgtactagatcaggaggccacgatgccgaaggtatgtcttatatctcccaagtgccattcgttgtcgtcgacttgaggaacatgcattctattaagattgatgtacactcccagaccgcatgggttgaagctggtgccacattaggtgaagtatactattggataaacgagaaaaatgaaaatttatcgtttcctggaggctattgtccaactgttggtgtcggtggtcatttctcaggcgggggctacggagcattgatgcgaaactacggactagcagctgataacattatagacgcccatctcgtgaatgtggatggtaaagttcttgatagaaagagcatgggtgaagatttgttttgggcgatcagaggcggtggaggggaaaactttggtattattgcggcttggaaaataaagctggtcgacgttccctcgaaagtaacaatcttttctgtaaagaaaaatatggaaatacatgggttggtcaagttattcaataaatggcaaaacattgcttataagtatgataaagacctcgttctgatgactcattttattacgaaaaatattaccgacaatcacggtaagaataaaactacagtgcacggttacttttcttcaattttccatggtggcgttgactctctagtagatttaatgaacaaaagtttccctgagttagggatcaagaaaacggattgtaaagaattttcttggatcgacacaaccatattctattcgggtgttgttaactttaataccgcaaactttaaaaaggaaattttgttagatcgctctgctggaaagaaaacagcatttagtatcaaacttgactatgtaaagaaaccgatacccgagactgccatggttaagatacttgagaagctatacgaagaggatgtgggagctggcatgtacgttctctacccttacggcggtataatggaagaaatttcagaatccgcaatcccattcccacacagagcaggtattatgtatgaactgtggtatactgcctcatgggagaaacaagaagataacgaaaaacacattaattgggtccgtagcgtctacaatttcactacaccatatgtatccaagaacccgagattggcttacttgaattatagagacttggatctaggaaaaaataatcatgaaagcccgaataattatacacaggcaaggatttggggcgagaagtatttcggcaagaacttcaacagattagtaaaagttaagaccaaagttgaccccaataacttttttagaaatgaacaaagtatccctccactcccaccacatcatcat

SEQ ID NO: 422 - DNA, 1551 bp, Artificial Sequence
  Synthetic
aatcccagggagaactttcttaagtgtttcagtaaacatatcccaaataacgtggcgaatccgaaattagtatacacgcaacacgatcagctatatatgagcattctgaatagtaccattcaaaacttgcgctttacatcggacacaactccaaagcctttagtcatagttactccttcaaatgtctcccatattcaggctacaatcctctgctctaaaaaagttgggttgcaaatacgtactagatcaggaggccacgatgccgaaggtatgtcttatatctcccaagtgccattcgttgtcgtcgacttgaggaacatgcattctattaagattgatgtacactcccagaccgcatgggttgaagctggtgccacattaggtgaagtatactattggataaacgagaaaaatgaaaatttatcgtttcctggaggctattgtccaactgttggtgtcggtggtcatttctcaggcgggggctacggagcattgatgcgaaactacggactagcagctgataacattatagacgcccatctcgtgaatgtggatggtaaagttcttgatagaaagagcatgggtgaagatttgttttgggcgatcagaggcggtggaggggaaaactttggtattattgcggcttggaaaataaagctggtcgatgttccctcgaaagtgacaatcttttctgtaaagaaaaatatggaaatacatgggttggtcaagttattcaataaatggcaaaacattgcttataagtatgataaagacctcgttctgatgactcattttattacgaaaaatattaccgacaatcacggtaagaataaaactacagtgcacggttacttttcttcaattttccatggtggcgttgactctctagtagatttaatgaacaaaagtttccctgagttagggatcaagaaaacggattgtaaagaattttcttggatcgacacaaccatattctattcgggtgttgttaactttaataccgcaaactttaaaaaggaaattttgttagatcgctctgctggaaagaaaacagcatttagtatcaaacttgactatgtaaagaaaccgatacccgagactgccatggttaagatacttgagaagctatacgaagaggatgtgggagctggcatgtacgttctctacccttacggcggtataatggatgaaatttcagaatccgcaatcccattcccacacagagcaggtattatgtatgaactgtggtatactgcctcatgggagaaacaagaagataacgaaaaacacattaattgggtccgtagcgtctacaatttcactacaccatatgtatcccaaaacccgagattggcttacttgaattatagagacttggatctaggaaaaaataatcatgaaagcccgaataattatacacaggcaaggatttggggcgagaagtatttcggcaagaacttcaacagattagtaaaagttaagaccaaagttgaccccaataacttttttagaaatgaacaaagtatccctccactcccaccacatcatcat

SEQ ID NO: 423 - DNA, 1551 bp, Artificial Sequence
  Synthetic
aatccccaagagaactttcttaagtgtttcagtcagtacatcccaaataacgtggcgaatccgaaattagtatacacgcaacacgatcagctatatatgagcattctgaatagtaccattcaaaacttgcgctttacttcggacacaactccaaagcctttagtcatagttactccttcaaatgtctcccatattcaggctacaatcctctgcgccaaaaaagttgggttgcaaatacgtactagatcaggaggccacgatgccgaaggtatgtcttatatctcccaagtgccattcgttattgtcgacttgaggaacatgcattctattaagattgatgtagaatcccagaccgcatgggttgaagctggtgccacattaggtgaagtatactattggataaacgagaaaaatgaaaatttatcgtttcctggaggctattgtccaactgttggtgtcggtggtcatttctcaggcgggggctacggagcattgatgcgaaactacggactagcagctgataacattatagacgcccatctcgtgaatgtggatggtaaagttcttgatagaaagagcatgggtgaagatttgttttgggcgatcagaggcggtggaggggaaaactttggtattattgcggcttggaaaataaagctggtcgcagttccctcgaaaagcacaatcttttctgtaaagaaaaatatggaaatacatgggttggtcaagttattcaataaatggcaaaacattgcttataagtatgataaagacctcttactgatgactcattttattacgagaaatattaccgacaatcacggtaagaataaaactacagtgcacggttacttttcttcaattttccatggtggcgttgactctctagtagatttaatgaacaaaagtttccctgagttagggatcaagaaaacggattgtaaagaattgtcttggatcgacacaataatattctattcgggtgttgttaactataataccgcaaactttaaaaaggaaattttgttagatcgctctgctggaaagaaaacagcatttagtatcaaacttgactatgtaaagaaaccgatacccgagactgccatggttaagatacttgagaagctatacgaagaggatgtgggagtcggcatgtacgttctctacccttacggcggtataatggatgaaatttcagaatccgcaatcccattcccacacagagcaggtattatgtatgaactgtggtatactgcctcatgggagaaacaagaagataacgaaaaacacattaattgggtccgtagcgtctacaatttcactacaccatatgtatcccaaaacccgagattggcttacttgaattatagagacttggatctaggaaaaaataatcctgagagcccgaataattatacacaggcaaggatttggggcgagaagtatttcggcaagaacttcaacagattagtaaaagttaagaccaaagttgaccccaataacttttttagaaatgaacaaagtatccctccactcccaccacatcatcat

SEQ ID NO: 424 - DNA, 1551 bp, Artificial Sequence
  Synthetic
aatccccaggagaactttcttaagtgtttcagtcaatacatcccaaataaccctgcgaatccgaaattagtatacacgcaaaacgatagcctatattcgagcattctgaatagtaccattcaaaacttgcgctttacttcggacacaactccaaagcctttagtcatagttactccttcaaatgtttcccatattcaggctacaatcctctgctctaaaaaagttgggttgcaaatacgtactagatcaggaggccacgatgccgaaggtatgtcttatatctcccaagtgccattcgttattgtcgacttgaggaacatgcattctattaagattgatgtacactcccagaccgcatgggttgaagctggtgccacattaggtgaagtatactattggataaacgagaaaaatgaaaatttatcgtttcctggaggctattgtccaactgttggtgtcggtggtcatttctcaggcgggggctacggagcattgatgcgaaactacggactagcagctgataacattatagacgcccatctcgtgaatgtggatggtaaagttcttgatagaaagagcatgggtgaagatttgttttgggcgatcagaggcggtggaggggaaaactttggtattattgcggcttggaaaataaagctggtcgcagttccctcgaaagtaacaatcttttctgtaaagaaaaatatggaaatacatgggttggtcaagttattcaataaatggcaaaacattgcttataagtatgataaagacctcttgctgatgactcattttattacgagaaatattaccgacaatcacggtaagaataaaactacagtgcacggttacttttcttcaattttccatggtggcgttgactctctagtagatttaatgaacaaaagtttccctgagttagggatcaagaaaacggattgtaaagaactatcttggatcgacacaaccatattctattcgggtgttgttaactataataccgcaaactttaaaaaggaaattttgttagatcgctctgctggaaagaaaacagcatttagtatcaaacttgactatgtaaagaaaccgatacccgagactgccatggttaagatacttgagaagctatacgaagaggatgtgggagtaggcatgtacgttctctacccttacggcggtataatggatgaaatttcagaatccgcaatcccattcccacacagagcaggtattatgtatgaactgtggtatactgcctcatgggagaaacaagaagataacgaaaaacacattaattgggtccgtagcgtctacaatttcactacaccatatgtatcccaaaacccgagattggcttacttgaattatagagacttggatctaggaaaaaataatccagagagcccgaataattatacacaggcaaggatttggggcgagaagtatttcggcaagaacttcaacagattagtaaaagttaagaccaaagttgaccccaataacttttttagaaatgaacaaagtatccctccactcccaccacatcatcat

SEQ ID NO: 425 - DNA, 1551 bp, Artificial Sequence
  Synthetic
aatccccaggagaactttcttaagtgtttcagtcaatatatcccaaataacgtggcgaatccgaaattaatatacacgcaacacgatcagctatattctagcattctgaatagtaccattcaaaacttgcgctttacatcggacacaactccaaagcctttagtcatagttactccttcaaatgtatcccatattcaggctacaatcctctgctctaaaaaagttgggttgcaaatacgtactagatcaggaggccacgatgccgaaggtatgtcttatatctcccaagtgccattcgttattgtcgacttgaggaacatgcattctattaagattgatgtacactcccagaccgcatgggttgaagctggtgccacattaggtgaagtatactattggataaacgagaaaaatgaaaatttatcgtttcctggaggctattgtccaactgttggtgtcggtggtcatttctcaggcgggggctacggagcattgatgcgaaactacggactagcagctgataacattatagacgcccatctcgtgaatgtggatggtaaagttcttgatagaaagagcatgggtgaagatttgttttgggcgatcagaggcggtggaggggaaaactttggtattattgcggcttggaaaataaagctggtcgcagttccctcgaaagttacaatcttttctgtaaagaaaaatatggaaatacatgggttggtcaagttattcaataaatggcaaaacattgcttataagtatgataaagacctcctgctgatgactcattttattacgagaaatattaccgacaatcacggtaagaataaaactacagtgcacggttacttttcttcaattttccatggtggcgttgactctctagtagatttaatgaacaaaagtttccctgagttagggatcaagaaagaagattgtaaagaattgtcttggatcgacacaaccatattctattcgggtgttgttaactataataccgcaaactttaaaaaggaaattttgttagatcgctctgctggaaagaaaacagcatttagtatcaaacttgactatgtaaagaaaccgatacccgagactgccatggttaagatacttgagaagctatacgaagaggatgtgggagtcggcatgtacgttctctacccttacggcggtataatggatgaaatttcagaatccgcaatcccattcccacacagagcaggtattatgtatgaactgtggtatactgcctcatgggagaaacaagaagataacgaaaaacacattaattgggtccgtagcgtctacaatttcactacaccatatgtatccaagaacccgagattggcttacttgaattatagagacttggatctaggaaaaaacaatcctgagagcccgaataattatacacaggcaaggatttggggcgagaagtatttcggcaagaacttcaacagattagtaaaagttaagaccaaagttgaccccaataacttttttagaaatgaacaaagtatccctccactcccaccacatcatcat

SEQ ID NO: 426 - DNA, 1551 bp, Artificial Sequence
  Synthetic
aatccccaagagaactttcttaagtgtttcagtcagtacatcccaaataacccggcgaatccgaaattaatttacacgcaaaacgatcagctatatagcagcattctgaatagtaccattcaaaacttgcgctttacttcggacacaactccaaagcctttagtcatagttactccttcaaatgtatcccatattcaggctacaatcctctgctctaaaaaagttgggttgcaaatacgtactagatcaggaggccacgatgccgaaggtatgtcttatatctcccaagtgccattcgttatagtcgacttgaggaacatgcattctattaagattgatgtacactcccagaccgcatgggttgaagctggtgccacattaggtgaagtatactattggataaacgagaaaaatgaaaatttatcgtttcctggaggctattgtccaactgttggtgtcggtggtcatttctcaggcgggggctacggagcattgatgcgaaactacggactagcagctgataacattatagacgcccatctcgtgaatgtggatggtaaagttcttgatagaaagagcatgggtgaagatttgttttgggcgatcagaggcggtggaggggaaaactttggtattattgcggcttggaaaataaagctggtcgcagttccctcgaaagtcacaatcttttctgtaaagaaaaatatggaaatacatgggttggtcaagttattcaataaatggcaaaacattgcttataagtatgataaagacctcttactgatgactcattttattacgaggaatattaccgacaatcacggtaagaataaaactacagtgcacggttacttttcttcaattttccatggtggcgttgactctctagtagatttaatgaacaaaagtttccctgagttagggatcaagaaagaggattgtaaagaattgtcttggatcgacacaaccatattctattcgggtgttgttaactataataccgcaaactttaaaaaggaaattttgttagatcgctctgctggaaagaaaacagcatttagtatcaaacttgactatgtaaagaaaccgatacccgagactgccatggttaagatacttgagaagctatacgaagaggatgtgggagtcggcatgtacgttctctacccttacggcggtataatggatgaaatttcagaatccgcaatcccattcccacacagagcaggtattatgtatgaactgtggtatactgcctcatgggagaaacaagaagataacgaaaaacacattaattgggtccgtagcgtctacaatttcactacaccatatgtatccaaaaacccgagattggcttacttgaattatagagacttggatctaggaaaaaataatcccgaaagcccgaataattatacacaggcaaggatttggggcgagaagtatttcggcaagaacttcaacagattagtaaaagttaagaccaaagttgaccccaataacttttttagaaatgaacaaagtatccctccactcccaccacatcatcat

SEQ ID NO: 427 - DNA, 1551 bp, Artificial Sequence
  Synthetic
aatccccaggagaactttcttaagtgtttcagtcaatatatcccaaataacgtggcgaatccgaaattagtatacacgcaacacgattcactatatatgagcattctgaatagtaccattcaaaacttgcgctttacatcggacacaactccaaagcctttagtcatagttactccttcaaatgtttcccatattcaggctacaatcctctgctctaaaaaagttgggttgcaaatacgtactagatcaggaggccacgatgccgaaggtatgtcttatatctcccaagtgccattcgttattgtcgacttgaggaacatgcattctattaagattgatgtagaatcccagaccgcatgggttgaagctggtgccacattaggtgaagtatactattggataaacgagaaaaatgaaaatttatcgtttcctggaggctattgtccaactgttggtgtcggtggtcatttctcaggcgggggctacggagcattgatgcgaaactacggactagcagctgataacattatagacgcccatctcgtgaatgtggatggtaaagttcttgatagaaagagcatgggtgaagatttgttttgggcgatcagaggcggtggaggggaaaactttggtattattgcggcttggaaaataaagctggtcgcagttccctcgaaagtaacaatcttttctgtaaagaaaaatatggaaatacatgggttggtcaagttattcaataaatggcaaaacattgcttataagtatgataaagacctcttgctgatgactcattttattacgagaaatattaccgacaatcacggtaagaataaaactacagtgcacggttacttttcttcaattttccatggtggcgttgactctctagtagatttaatgaacaaaagtttccctgagttagggatcaagaaaacggattgtaaagaactttcttggatcgacacaaccatattctattcgggtgttgttaactataataccgcaaactttaaaaaggaaattttgttagatcgctctgctggaaagaaaacagcatttagtatcaaacttgactatgtaaagaaaccgatacccgagactgccatggttaagatacttgagaagctatacgaagaggatgtgggagtcggcatgtacgttctctacccttacggcggtataatggatgaaatttcagaatccgcaatcccattcccacacagagcaggtattatgtatgaactgtggtatactgcctcatgggagaaacaagaagataacgaaaaacacattaattgggtccgtagcgtctacaatttcactacaccatatgtatcccaaaacccgagattggcttacttgaattatagagacttggatctaggaaaaaacaatccagaaagcccgaataattatacacaggcaaggatttggggcgagaagtatttcggcaagaacttcaacagattagtaaaagttaagaccaaagttgaccccaataacttttttagaaatgaacaaagtatccctccactcccaccacatcatcat

SEQ ID NO: 428 - DNA, 1551 bp, Artificial Sequence
  Synthetic
aatcccagggagaactttcttaagtgtttcagtaaacatatcccaaataacccggcgaatccgaaattagtatacacgcaacacgatcagctatatagcagcattctgaatagtaccattcaaaacttgcgctttacttcggacacaactccaaagcctttagtcatagttactccttcaaatgtttcccatattcaggctacaatcctctgctctaaaaaagttgggttgcaaatacgtactagatcaggaggccacgatgccgaaggtatgtcttatatctcccaagtgccattcgttgtcgtcgacttgaggaacatgcattctattaagattgatgtacactcccagaccgcatgggttgaagctggtgccacattaggtgaagtatactattggataaacgagaaaaatgaaaatttatcgtttcctggaggctattgtccaactgttggtgtcggtggtcatttctcaggcgggggctacggagcattgatgcgaaactacggactagcagctgataacattatagacgcccatctcgtgaatgtggatggtaaagttcttgatagaaagagcatgggtgaagatttgttttgggcgatcagaggcggtggaggggaaaactttggtattattgcggcttggaaaataaagctggtcgacgttccctcgaaagtaacaatcttttctgtaaagaaaaatatggaaatacatgggttggtcaagttattcaataaatggcaaaacattgcttataagtatgataaagacctcgttctgatgactcattttattacgaaaaatattaccgacaatcacggtaagaataaaactacagtgcacggttacttttcttcaattttccatggtggcgttgactctctagtagatttaatgaacaaaagtttccctgagttagggatcaagaaaacggattgtaaagaattttcttggatcgacacaaccatattctattcgggtgttgttaactttaataccgcaaactttaaaaaggaaattttgttagatcgctctgctggaaagaaaacagcatttagtatcaaacttgactatgtaaagaaaccgatacccgagactgccatggttaagatacttgagaagctatacgaagaggatgtgggagctggcatgtacgttctctacccttacggcggtataatggatgaaatttcagaatccgcaatcccattcccacacagagcaggtattatgtatgaactgtggtatactgcctcatgggagaaacaagaagataacgaaaaacacattaattgggtccgtagcgtctacaatttcactacaccatatgtatccaaaaacccgagattggcttacttgaattatagagacttggatctaggaaaaaataatgaggaaagcccgaataattatacacaggcaaggatttggggcgagaagtatttcggcaagaacttcaacagattagtaaaagttaagaccaaagttgaccccaataacttttttagaaatgaacaaagtatccctccactcccaccacatcatcat

SEQ ID NO: 429 - DNA, 1551 bp, Artificial Sequence
  Synthetic
aatcccagggagaactttcttaagtgtttcagtaaacatatcccaaataacccggcgaatccgaaattagtatacacgcaacacgatcagctatattctagcattctgaatagtaccattcaaaacttgcgctttacttcggacacaactccaaagcctttagtcatagttactccttcaaatgtgtcccatattcaggctacaatcctctgctctaaaaaagttgggttgcaaatacgtactagatcaggaggccacgatgccgaaggtatgtcttatatctcccaagtgccattcgttgtcgtcgacttgaggaacatgcattctattaagattgatgtacactcccagaccgcatgggttgaagctggtgccacattaggtgaagtatactattggataaacgagaaaaatgaaaatttatcgtttcctggaggctattgtccaactgttggtgtcggtggtcatttctcaggcgggggctacggagcattgatgcgaaactacggactagcagctgataacattatagacgcccatctcgtgaatgtggatggtaaagttcttgatagaaagagcatgggtgaagatttgttttgggcgatcagaggcggtggaggggaaaactttggtattattgcggcttggaaaataaagctggtccccgttccctcgaaagtaacaatcttttctgtaaagaaaaatatggaaatacatgggttggtcaagttattcaataaatggcaaaacattgcttataagtatgataaagacctcgttctgatgactcattttattacgaaaaatattaccgacaatcacggtaagaataaaactacagtgcacggttacttttcttcaattttccatggtggcgttgactctctagtagatttaatgaacaaaagtttccctgagttagggatcaagaaaacggattgtaaagaattttcttggatcgacacaaccatattctattcgggtgttgttaactttaataccgcaaactttaaaaaggaaattttgttagatcgctctgctggaaagaaaacagcatttagtatcaaacttgactatgtaaagaaaccgatacccgagactgccatggttaagatacttgagaagctatacgaagaggatgtgggagctggcatgtacgttctctacccttacggcggtataatggaagaaatttcagaatccgcaatcccattcccacacagagcaggtattatgtatgaactgtggtatactgcctcatgggagaaacaagaagataacgaaaaacacattaattgggtccgtagcgtctacaatttcactacaccatatgtatcccaaaacccgagattggcttacttgaattatagagacttggatctaggaaaaaacaatgaagccagcccgaataattatacacaggcaaggatttggggcgagaagtatttcggcaagaacttcaacagattagtaaaagttaagaccaaagttgaccccaataacttttttagaaatgaacaaagtatccctccactcccaccacatcatcat

SEQ ID NO: 430 - DNA, 1551 bp, Artificial Sequence
  Synthetic
aatccccaagagaactttcttaagtgtttcagtcagtacatcccaaataacgtggcgaatccgaaattagtatacacgcaacacgatcagctatatatgagcattctgaatagtaccattcaaaacttgcgctttacatcggacacaactccaaagcctttagtcatagttactccttcaaatgtttcccatattcaggctacaatcctctgctctaaaaaagttgggttgcaaatacgtactagatcaggaggccacgatgccgaaggtatgtcttatatctcccaagtgccattcgttattgtcgacttgaggaacatgcattctattaagattgatgtacactcccagaccgcatgggttgaagctggtgccacattaggtgaagtatactattggataaacgagaaaaatgaaaatttatcgtttcctggaggctattgtccaactgttggtgtcggtggtcatttctcaggcgggggctacggagcattgatgcgaaactacggactagcagctgataacattatagacgcccatctcgtgaatgtggatggtaaagttcttgatagaaagagcatgggtgaagatttgttttgggcgatcagaggcggtggaggggaaaactttggtattattgcggcttggaaaataaagctggtcgcagttccctcgaaagtaacaatcttttctgtaaagaaaaatatggaaatacatgggttggtcaagttattcaataaatggcaaaacattgcttataagtatgataaagacctcctactgatgactcattttattacgcggaatattaccgacaatcacggtaagaataaaactacagtgcacggttacttttcttcaattttccatggtggcgttgactctctagtagatttaatgaacaaaagtttccctgagttagggatcaagaaaacggattgtaaagaactttcttggatcgacacaataatattctattcgggtgttgttaactacaataccgcaaactttaaaaaggaaattttgttagatcgctctgctggaaagaaaacagcatttagtatcaaacttgactatgtaaagaaaccgatacccgagactgccatggttaagatacttgagaagctatacgaagaggatgtgggagtgggcatgtacgttctctacccttacggcggtataatggatgaaatttcagaatccgcaatcccattcccacacagagcaggtattatgtatgaactgtggtatactgcctcatgggagaaacaagaagataacgaaaaacacattaattgggtccgtagcgtctacaatttcactacaccatatgtatcccaaaacccgagattggcttacttgaattatagagacttggatctaggaaaaaccaatccggaaagcccgaataattatacacaggcaaggatttggggcgagaagtatttcggcaagaacttcaacagattagtaaaagttaagaccaaagttgaccccaataacttttttagaaatgaacaaagtatccctccactcccaccacatcatcat

SEQ ID NO: 431 - DNA, 1551 bp, Artificial Sequence
  Synthetic
aatccccaggagaactttcttaagtgtttcagtcaatacatcccaaataacccggcgaatccgaaattagtatacacgcaacacgattcactatatatgagcattctgaatagtaccattcaaaacttgcgctttacttcggacacaactccaaagcctttagtcatagttactccttcaaatgtttcccatattcaggctacaatcctctgctctaaaaaagttgggttgcaaatacgtactagatcaggaggccacgatgccgaaggtatgtcttatatctcccaagtgccattcgttattgtcgacttgaggaacatgcattctattaagattgatgtacactcccagaccgcatgggttgaagctggtgccacattaggtgaagtatactattggataaacgagaaaaatgaaaatttatcgtttcctggaggctattgtccaactgttggtgtcggtggtcatttctcaggcgggggctacggagcattgatgcgaaactacggactagcagctgataacattatagacgcccatctcgtgaatgtggatggtaaagttcttgatagaaagagcatgggtgaagatttgttttgggcgatcagaggcggtggaggggaaaactttggtattattgcggcttggaaaataaagctggtcgcagttccctcgaaagtaacaatcttttctgtaaagaaaaatatggaaatacatgggttggtcaagttattcaataaatggcaaaacattgcttataagtatgataaagacctccttctgatgactcattttattacgagaaatattaccgacaatcacggtaagaataaaactacagtgcacggttacttttcttcaattttccatggtggcgttgactctctagtagatttaatgaacaaaagtttccctgagttagggatcaagaaagaagattgtaaagaattgtcttggatcgacacaaccatattctattcgggtgttgttaactataataccgcaaactttaaaaaggaaattttgttagatcgctctgctggaaagaaaacagcatttagtatcaaacttgactatgtaaagaaaccgatacccgagactgccatggttaagatacttgagaagctatacgaagaggatgtgggagtgggcatgtacgttctctacccttacggcggtataatggatgaaatttcagaatccgcaatcccattcccacacagagcaggtattatgtatgaactgtggtatactgcctcatgggagaaacaagaagataacgaaaaacacattaattgggtccgtagcgtctacaatttcactacaccatatgtatccaaaaacccgagattggcttacttgaattatagagacttggatctaggaaaaaacaatcctgagagcccgaataattatacacaggcaaggatttggggcgagaagtatttcggcaagaacttcaacagattagtaaaagttaagaccaaagttgaccccaataacttttttagaaatgaacaaagtatccctccactcccaccacatcatcat

SEQ ID NO: 432 - DNA, 1551 bp, Artificial Sequence
  Synthetic
aatccccaggagaactttcttaagtgtttcagtcaatacatcccaaataacgtggcgaatccgaaattagtatacacgcaacacgatagcctatatatgagcattctgaatagtaccattcaaaacttgcgctttacatcggacacaactccaaagcctttagtcatagttactccttcaaatgtttcccatattcaggctacaatcctctgctctaaaaaagttgggttgcaaatacgtactagatcaggaggccacgatgccgaaggtatgtcttatatctcccaagtgccattcgttattgtcgacttgaggaacatgcattctattaagattgatgtacactcccagaccgcatgggttgaagctggtgccacattaggtgaagtatactattggataaacgagaaaaatgaaaatttatcgtttcctggaggctattgtccaactgttggtgtcggtggtcatttctcaggcgggggctacggagcattgatgcgaaactacggactagcagctgataacattatagacgcccatctcgtgaatgtggatggtaaagttcttgatagaaagagcatgggtgaagatttgttttgggcgatcagaggcggtggaggggaaaactttggtattattgcggcttggaaaataaagctggtcgcagttccctcgaaagttacaatcttttctgtaaagaaaaatatggaaatacatgggttggtcaagttattcaataaatggcaaaacattgcttataagtatgataaagacctcctgctgatgactcattttattacgaggaatattaccgacaatcacggtaagaataaaactacagtgcacggttacttttcttcaattttccatggtggcgttgactctctagtagatttaatgaacaaaagtttccctgagttagggatcaagaaaacggattgtaaagaattgtcttggatcgacacaaccatattctattcgggtgttgttaactataataccgcaaactttaaaaaggaaattttgttagatcgctctgctggaaagaaaacagcatttagtatcaaacttgactatgtaaagaaaccgatacccgagactgccatggttaagatacttgagaagctatacgaagaggatgtgggagtgggcatgtacgttctctacccttacggcggtataatggatgaaatttcagaatccgcaatcccattcccacacagagcaggtattatgtatgaactgtggtatactgcctcatgggagaaacaagaagataacgaaaaacacattaattgggtccgtagcgtctacaatttcactacaccatatgtatccaaaaacccgagattggcttacttgaattatagagacttggatctaggaaaaaataatcccgaaagcccgaataattatacacaggcaaggatttggggcgagaagtatttcggcaagaacttcaacagattagtaaaagttaagaccaaagttgaccccaataacttttttagaaatgaacaaagtatccctccactcccaccacatcatcat

SEQ ID NO: 433 - DNA, 1551 bp, Artificial Sequence
  Synthetic
aatccccaagagaactttcttaagtgtttcagtcagtatatcccaaataacgtggcgaatccgaaattagtatacacgcaacacgatcagctatatatgagcattctgaatagtaccattcaaaacttgcgctttacatcggacacaactccaaagcctttagtcatagttactccttcaaatgtttcccatattcaggctacaatcctctgctctaaaaaagttgggttgcaaatacgtactagatcaggaggccacgatgccgaaggtatgtcttatatctcccaagtgccattcgttattgtcgacttgaggaacatgcattctattaagattgatgtacactcccagaccgcatgggttgaagctggtgccacattaggtgaagtatactattggataaacgagaaaaatgaaaatttatcgtttcctggaggctattgtccaactgttggtgtcggtggtcatttctcaggcgggggctacggagcattgatgcgaaactacggactagcagctgataacattatagacgcccatctcgtgaatgtggatggtaaagttcttgatagaaagagcatgggtgaagatttgttttgggcgatcagaggcggtggaggggaaaactttggtattattgcggcttggaaaataaagctggtcgcagttccctcgaaagtaacaatcttttctgtaaagaaaaatatggaaatacatgggttggtcaagttattcaataaatggcaaaacattgcttataagtatgataaagacctcctcctgatgactcattttattacgaggaatattaccgacaatcacggtaagaataaaactacagtgcacggttacttttcttcaattttccatggtggcgttgactctctagtagatttaatgaacaaaagtttccctgagttagggatcaagaaaacggattgtaaagaattgtcttggatcgacacaaccatattctattcgggtgttgttaactataataccgcaaactttaaaaaggaaattttgttagatcgctctgctggaaagaaaacagcatttagtatcaaacttgactatgtaaagaaaccgatacccgagactgccatggttaagatacttgagaagctatacgaagaggatgtgggagtcggcatgtacgttctctacccttacggcggtataatggatgaaatttcagaatccgcaatcccattcccacacagagcaggtattatgtatgaactgtggtatactgcctcatgggagaaacaagaagataacgaaaaacacattaattgggtccgtagcgtctacaatttcactacaccatatgtatcccaaaacccgagattggcttacttgaattatagagacttggatctaggaaaaaccaatccagaaagcccgaataattatacacaggcaaggatttggggcgagaagtatttcggcaagaacttcaacagattagtaaaagttaagaccaaagttgaccccaataacttttttagaaatgaacaaagtatccctccactcccaccacatcatcat

SEQ ID NO: 434 - DNA, 1551 bp, Artificial Sequence
  Synthetic
aatccccaagagaactttcttaagtgtttcagtcagtatatcccaaataacgtggcgaatccgaaattagtatacacgcaaaatgatcagctatatatgagcattctgaatagtaccattcaaaacttgcgctttacttcggacacaactccaaagcctttagtcatagttactccttcaaatgtttcccatattcaggctacaatcctctgctctaaaaaagttgggttgcaaatacgtactagatcaggaggccacgatgccgaaggtatgtcttatatctcccaagtgccattcgttatagtcgacttgaggaacatgcattctattaagattgatgtacactcccagaccgcatgggttgaagctggtgccacattaggtgaagtatactattggataaacgagaaaaatgaaaatttatcgtttcctggaggctattgtccaactgttggtgtcggtggtcatttctcaggcgggggctacggagcattgatgcgaaactacggactagcagctgataacattatagacgcccatctcgtgaatgtggatggtaaagttcttgatagaaagagcatgggtgaagatttgttttgggcgatcagaggcggtggaggggaaaactttggtattattgcggcttggaaaataaagctggtcgcagttccctcgaaaagcacaatcttttctgtaaagaaaaatatggaaatacatgggttggtcaagttattcaataaatggcaaaacattgcttataagtatgataaagacctcttgctgatgactcattttattacgagaaatattaccgacaatcacggtaagaataaaactacagtgcacggttacttttcttcaattttccatggtggcgttgactctctagtagatttaatgaacaaaagtttccctgagttagggatcaagaaaacggattgtaaagaactatcttggatcgacacaaccatattctattcgggtgttgttaactacaataccgcaaactttaaaaaggaaattttgttagatcgctctgctggaaagaaaacagcatttagtatcaaacttgactatgtaaagaaaccgatacccgagactgccatggttaagatacttgagaagctatacgaagaggatgtgggagtcggcatgtacgttctctacccttacggcggtataatggatgaaatttcagaatccgcaatcccattcccacacagagcaggtattatgtatgaactgtggtatactgcctcatgggagaaacaagaagataacgaaaaacacattaattgggtccgtagcgtctacaatttcactacaccatatgtatccaaaaacccgagattggcttacttgaattatagagacttggatctaggaaaaaccaatccagaaagcccgaataattatacacaggcaaggatttggggcgagaagtatttcggcaagaacttcaacagattagtaaaagttaagaccaaagttgaccccaataacttttttagaaatgaacaaagtatccctccactcccaccacatcatcat

SEQ ID NO: 435 - DNA, 1551 bp, Artificial Sequence
  Synthetic
aatccccaagagaactttcttaagtgtttcagtaaacatatcccaaataacgtggcgaatccgaaattagtatacacgcaacacgatcagctatatagcagcattctgaatagtaccattcaaaacttgcgctttacatcggacacaactccaaagcctttagtcatagttactccttcaaatgtttcccatattcaggctacaatcctctgctctaaaaaagttgggttgcaaatacgtactagatcaggaggccacgatgccgaaggtatgtcttatatctcccaagtgccattcgttgtcgtcgacttgaggaacatgcattctattaagattgatgtacactcccagaccgcatgggttgaagctggtgccacattaggtgaagtatactattggataaacgagaaaaatgaaaatttatcgtttcctggaggctattgtccaactgttggtgtcggtggtcatttctcaggcgggggctacggagcattgatgcgaaactacggactagcagctgataacattatagacgcccatctcgtgaatgtggatggtaaagttcttgatagaaagagcatgggtgaagatttgttttgggcgatcagaggcggtggaggggaaaactttggtattattgcggcttggaaaataaagctggtccccgttccctcgaaagtaacaatcttttctgtaaagaaaaatatggaaatacatgggttggtcaagttattcaataaatggcaaaacattgcttataagtatgataaagacctcgttctgatgactcattttattacgaaaaatattaccgacaatcacggtaagaataaaactacagtgcacggttacttttcttcaattttccatggtggcgttgactctctagtagatttaatgaacaaaagtttccctgagttagggatcaagaaaacggattgtaaagaattttcttggatcgacacaaccatattctattcgggtgttgttaactttaataccgcaaactttaaaaaggaaattttgttagatcgctctgctggaaagaaaacagcatttagtatcaaacttgactatgtaaagaaaccgatacccgagactgccatggttaagatacttgagaagctatacgaagaggatgtgggagctggcatgtacgttctctacccttacggcggtataatggaagaaatttcagaatccgcaatcccattcccacacagagcaggtattatgtatgaactgtggtatactgcctcatgggagaaacaagaagataacgaaaaacacattaattgggtccgtagcgtctacaatttcactacaccatatgtatccaagaacccgagattggcttacttgaattatagagacttggatctaggaaaaaacaatgaagagagcccgaataattatacacaggcaaggatttggggcgagaagtatttcggcaagaacttcaacagattagtaaaagttaagaccaaagttgaccccaataacttttttagaaatgaacaaagtatccctccactcccaccacatcatcat

SEQ ID NO: 436 - DNA, 1551 bp, Artificial Sequence
  Synthetic
aatccccaggagaactttcttaagtgtttcagtcaatatatcccaaataacgtggcgaatccgaaattagtatacacgcaacacgatcagctatatatgagcattctgaatagtaccattcaaaacttgcgctttacttcggacacaactccaaagcctttagtcatagttactccttcaaatgtttcccatattcaggctacaatcctctgctctaaaaaagttgggttgcaaatacgtactagatcaggaggccacgatgccgaaggtatgtcttatatctcccaagtgccattcgttatagtcgacttgaggaacatgcattctattaagattgatgtacactcccagaccgcatgggttgaagctggtgccacattaggtgaagtatactattggataaacgagaaaaatgaaaatttatcgtttcctggaggctattgtccaactgttggtgtcggtggtcatttctcaggcgggggctacggagcattgatgcgaaactacggactagcagctgataacattatagacgcccatctcgtgaatgtggatggtaaagttcttgatagaaagagcatgggtgaagatttgttttgggcgatcagaggcggtggaggggaaaactttggtattattgcggcttggaaaataaagctggtcgcagttccctcgaaagtaacaatcttttctgtaaagaaaaatatggaaatacatgggttggtcaagttattcaataaatggcaaaacattgcttataagtatgataaagacctcctactgatgactcattttattacgaggaatattaccgacaatcacggtaagaataaaactacagtgcacggttacttttcttcaattttccatggtggcgttgactctctagtagatttaatgaacaaaagtttccctgagttagggatcaagaaagaagattgtaaagaactatcttggatcgacacaaccatattctattcgggtgttgttaactacaataccgcaaactttaaaaaggaaattttgttagatcgctctgctggaaagaaaacagcatttagtatcaaacttgactatgtaaagaaaccgatacccgagactgccatggttaagatacttgagaagctatacgaagaggatgtgggagtaggcatgtacgttctctacccttacggcggtataatggatgaaatttcagaatccgcaatcccattcccacacagagcaggtattatgtatgaactgtggtatactgcctcatgggagaaacaagaagataacgaaaaacacattaattgggtccgtagcgtctacaatttcactacaccatatgtatccaaaaacccgagattggcttacttgaattatagagacttggatctaggaaaaaacaatcccgagagcccgaataattatacacaggcaaggatttggggcgagaagtatttcggcaagaacttcaacagattagtaaaagttaagaccaaagttgaccccaataacttttttagaaatgaacaaagtatccctccactcccaccacatcatcat

SEQ ID NO: 437 - DNA, 1551 bp, Artificial Sequence
  Synthetic
aatcccagggagaactttcttaagtgtttcagtaaacatatcccaaataacgtggcgaatccgaaattagtatacacgcaacacgatcagctatatatgagcattctgaatagtaccattcaaaacttgcgctttatatcggacacaactccaaagcctttagtcatagttactccttcaaatgtttcccatattcaggctacaatcctctgctctaaaaaagttgggttgcaaatacgtactagatcaggaggccacgatgccgaaggtatgtcttatatctcccaagtgccattcgttgtcgtcgacttgaggaacatgcattctattaagattgatgtacactcccagaccgcatgggttgaagctggtgccacattaggtgaagtatactattggataaacgagaaaaatgaaaatttatcgtttcctggaggctattgtccaactgttggtgtcggtggtcatttctcaggcgggggctacggagcattgatgcgaaactacggactagcagctgataacattatagacgcccatctcgtgaatgtggatggtaaagttcttgatagaaagagcatgggtgaagatttgttttgggcgatcagaggcggtggaggggaaaactttggtattattgcggcttggaaaataaagctggtcgacgttccctcgaaagtaacaatcttttctgtaaagaaaaatatggaaatacatgggttggtcaagttattcaataaatggcaaaacattgcttataagtatgataaagacctcgttctgatgactcattttattacgaaaaatattaccgacaatcacggtaagaataaaactacagtgcacggttacttttcttcaattttccatggtggcgttgactctctagtagatttaatgaacaaaagtttccctgagttagggatcaagaaaacggattgtaaagaattttcttggatcgacacaaccatattctattcgggtgttgttaactttaataccgcaaactttaaaaaggaaattttgttagatcgctctgctggaaagaaaacagcatttagtatcaaacttgactatgtaaagaaaccgatacccgagactgccatggttaagatacttgagaagctatacgaagaggatgtgggagctggcatgtacgttctctacccttacggcggtataatggaagaaatttcagaatccgcaatcccattcccacacagagcaggtattatgtatgaactgtggtatactgcctcatgggagaaacaagaagataacgaaaaacacattaattgggtccgtagcgtctacaatttcactacaccatatgtatccaagaacccgagattggcttacttgaattatagagacttggatctaggaaaaaacaatgaagagagcccgaataattatacacaggcaaggatttggggcgagaagtatttcggcaagaacttcaacagattagtaaaagttaagaccaaagttgaccccaataacttttttagaaatgaacaaagtatccctccactcccaccacatcatcat

SEQ ID NO: 438 - DNA, 1551 bp, Artificial Sequence
  Synthetic
aatcccagggagaactttcttaagtgtttcagtaaacatatcccaaataacgtggcgaatccgaaattagtatacacgcaacacgatcagctatattccagcattctgaatagtaccattcaaaacttgcgctttacatcggacacaactccaaagcctttagtcatagttactccttcaaatgtatcccatattcaggctacaatcctctgctctaaaaaagttgggttgcaaatacgtactagatcaggaggccacgatgccgaaggtatgtcttatatctcccaagtgccattcgttgtcgtcgacttgaggaacatgcattctattaagattgatgtagaatcccagaccgcatgggttgaagctggtgccacattaggtgaagtatactattggataaacgagaaaaatgaaaatttatcgtttcctggaggctattgtccaactgttggtgtcggtggtcatttctcaggcgggggctacggagcattgatgcgaaactacggactagcagctgataacattatagacgcccatctcgtgaatgtggatggtaaagttcttgatagaaagagcatgggtgaagatttgttttgggcgatcagaggcggtggaggggaaaactttggtattattgcggcttggaaaataaagctggtccccgttccctcgaaagtcacaatcttttctgtaaagaaaaatatggaaatacatgggttggtcaagttattcaataaatggcaaaacattgcttataagtatgataaagacctcgttctgatgactcattttattacgaaaaatattaccgacaatcacggtaagaataaaactacagtgcacggttacttttcttcaattttccatggtggcgttgactctctagtagatttaatgaacaaaagtttccctgagttagggatcaagaaaacggattgtaaagaattttcttggatcgacacaaccatattctattcgggtgttgttaactttaataccgcaaactttaaaaaggaaattttgttagatcgctctgctggaaagaaaacagcatttagtatcaaacttgactatgtaaagaaaccgatacccgagactgccatggttaagatacttgagaagctatacgaagaggatgtgggagctggcatgtacgttctctacccttacggcggtataatggaagaaatttcagaatccgcaatcccattcccacacagagcaggtattatgtatgaactgtggtatactgcctcatgggagaaacaagaagataacgaaaaacacattaattgggtccgtagcgtctacaatttcactacaccatatgtatccaagaacccgagattggcttacttgaattatagagacttggatctaggaaaaaacaatgaagaaagcccgaataattatacacaggcaaggatttggggcgagaagtatttcggcaagaacttcaacagattagtaaaagttaagaccaaagttgaccccaataacttttttagaaatgaacaaagtatccctccactcccaccacatcatcat

SEQ ID NO: 439 - DNA, 1551 bp, Artificial Sequence
  Synthetic
aatccccaggagaactttcttaagtgtttcagtaaacatatcccaaataaccctgcgaatccgaaattagtatacacgcaacacgatcagctatatatgagcattctgaatagtaccattcaaaacttgcgctttacatcggacacaactccaaagcctttagtcatagttactccttcaaatgtgtcccatattcaggctacaatcctctgctctaaaaaagttgggttgcaaatacgtactagatcaggaggccacgatgccgaaggtatgtcttatatctcccaagtgccattcgttgtcgtcgacttgaggaacatgcattctattaagattgatgtacactcccagaccgcatgggttgaagctggtgccacattaggtgaagtatactattggataaacgagaaaaatgaaaatttatcgtttcctggaggctattgtccaactgttggtgtcggtggtcatttctcaggcgggggctacggagcattgatgcgaaactacggactagcagctgataacattatagacgcccatctcgtgaatgtggatggtaaagttcttgatagaaagagcatgggtgaagatttgttttgggcgatcagaggcggtggaggggaaaactttggtattattgcggcttggaaaataaagctggtcgacgttccctcgaaagtaacaatcttttctgtaaagaaaaatatggaaatacatgggttggtcaagttattcaataaatggcaaaacattgcttataagtatgataaagacctcgttctgatgactcattttattacgaaaaatattaccgacaatcacggtaagaataaaactacagtgcacggttacttttcttcaattttccatggtggcgttgactctctagtagatttaatgaacaaaagtttccctgagttagggatcaagaaaacggattgtaaagaattttcttggatcgacacaaccatattctattcgggtgttgttaactttaataccgcaaactttaaaaaggaaattttgttagatcgctctgctggaaagaaaacagcatttagtatcaaacttgactatgtaaagaaaccgatacccgagactgccatggttaagatacttgagaagctatacgaagaggatgtgggagctggcatgtacgttctctacccttacggcggtataatggaagaaatttcagaatccgcaatcccattcccacacagagcaggtattatgtatgaactgtggtatactgcctcatgggagaaacaagaagataacgaaaaacacattaattgggtccgtagcgtctacaatttcactacaccatatgtatccaagaacccgagattggcttacttgaattatagagacttggatctaggaaaaaataatgaggccagcccgaataattatacacaggcaaggatttggggcgagaagtatttcggcaagaacttcaacagattagtaaaagttaagaccaaagttgaccccaataacttttttagaaatgaacaaagtatccctccactcccaccacatcatcat

SEQ ID NO: 440 - DNA, 1551 bp, Artificial Sequence
  Synthetic
aatccccaggagaactttcttaagtgtttcagtcaatatatcccaaataacgtggcgaatccgaaattagtatacacgcaacacgattccctatattcgagcattctgaatagtaccattcaaaacttgcgctttacatcggacacaactccaaagcctttagtcatagttactccttcaaatgtttcccatattcaggctacaatcctctgctctaaaaaagttgggttgcaaatacgtactagatcaggaggccacgatgccgaaggtatgtcttatatctcccaagtgccattcgttattgtcgacttgaggaacatgcattctattaagattgatgtagaatcccagaccgcatgggttgaagctggtgccacattaggtgaagtatactattggataaacgagaaaaatgaaaatttatcgtttcctggaggctattgtccaactgttggtgtcggtggtcatttctcaggcgggggctacggagcattgatgcgaaactacggactagcagctgataacattatagacgcccatctcgtgaatgtggatggtaaagttcttgatagaaagagcatgggtgaagatttgttttgggcgatcagaggcggtggaggggaaaactttggtattattgcggcttggaaaataaagctggtcgcagttccctcgaaagtaacaatcttttctgtaaagaaaaatatggaaatacatgggttggtcaagttattcaataaatggcaaaacattgcttataagtatgataaagacctccttctgatgactcattttattacgaggaatattaccgacaatcacggtaagaataaaactacagtgcacggttacttttcttcaattttccatggtggcgttgactctctagtagatttaatgaacaaaagtttccctgagttagggatcaagaaagaagattgtaaagaattgtcttggatcgacacaaccatattctattcgggtgttgttaactacaataccgcaaactttaaaaaggaaattttgttagatcgctctgctggaaagaaaacagcatttagtatcaaacttgactatgtaaagaaaccgatacccgagactgccatggttaagatacttgagaagctatacgaagaggatgtgggagtcggcatgtacgttctctacccttacggcggtataatggatgaaatttcagaatccgcaatcccattcccacacagagcaggtattatgtatgaactgtggtatactgcctcatgggagaaacaagaagataacgaaaaacacattaattgggtccgtagcgtctacaatttcactacaccatatgtatcccaaaacccgagattggcttacttgaattatagagacttggatctaggaaaaaacaatccagagagcccgaataattatacacaggcaaggatttggggcgagaagtatttcggcaagaacttcaacagattagtaaaagttaagaccaaagttgaccccaataacttttttagaaatgaacaaagtatccctccactcccaccacatcatcat

SEQ ID NO: 441 - DNA, 1551 bp, Artificial Sequence
  Synthetic
aatcccagggagaactttcttaagtgtttcagtaaacatatcccaaataacgtggcgaatccgaaattagtatacacgcaacacgatcagctatatatgagcattctgaatagtaccattcaaaacttgcgctttatatcggacacaactccaaagcctttagtcatagttactccttcaaatgtttcccatattcaggctacaatcctctgctctaaaaaagttgggttgcaaatacgtactagatcaggaggccacgatgccgaaggtatgtcttatatctcccaagtgccattcgttgtcgtcgacttgaggaacatgcattctattaagattgatgtacactcccagaccgcatgggttgaagctggtgccacattaggtgaagtatactattggataaacgagaaaaatgaaaatttatcgtttcctggaggctattgtccaactgttggtgtcggtggtcatttctcaggcgggggctacggagcattgatgcgaaactacggactagcagctgataacattatagacgcccatctcgtgaatgtggatggtaaagttcttgatagaaagagcatgggtgaagatttgttttgggcgatcagaggcggtggaggggaaaactttggtattattgcggcttggaaaataaagctggtccctgttccctcgaaagtaacaatcttttctgtaaagaaaaatatggaaatacatgggttggtcaagttattcaataaatggcaaaacattgcttataagtatgataaagacctcgttctgatgactcattttattacgaaaaatattaccgacaatcacggtaagaataaaactacagtgcacggttacttttcttcaattttccatggtggcgttgactctctagtagatttaatgaacaaaagtttccctgagttagggatcaagaaaacggattgtaaagaattttcttggatcgacacaaccatattctattcgggtgttgttaactttaataccgcaaactttaaaaaggaaattttgttagatcgctctgctggaaagaaaacagcatttagtatcaaacttgactatgtaaagaaaccgatacccgagactgccatggttaagatacttgagaagctatacgaagaggatgtgggagctggcatgtacgttctctacccttacggcggtataatggaagaaatttcagaatccgcaatcccattcccacacagagcaggtattatgtatgaactgtggtatactgcctcatgggagaaacaagaagataacgaaaaacacattaattgggtccgtagcgtctacaatttcactacaccatatgtatccaaaaacccgagattggcttacttgaattatagagacttggatctaggaaaaaataatgaggccagcccgaataattatacacaggcaaggatttggggcgagaagtatttcggcaagaacttcaacagattagtaaaagttaagaccaaagttgaccccaataacttttttagaaatgaacaaagtatccctccactcccaccacatcatcat

SEQ ID NO: 442 - DNA, 1551 bp, Artificial Sequence
  Synthetic
aatccccaagagaactttcttaagtgtttcagtcagtacatcccaaataaccctgcgaatccgaaattagtatacacgcaaaacgattcactatattctagcattctgaatagtaccattcaaaacttgcgctttacatcggacacaactccaaagcctttagtcatagttactccttcaaatgtgtcccatattcaggctacaatcctctgctctaaaaaagttgggttgcaaatacgtactagatcaggaggccacgatgccgaaggtatgtcttatatctcccaagtgccattcgttattgtcgacttgaggaacatgcattctattaagattgatgtagaatcccagaccgcatgggttgaagctggtgccacattaggtgaagtatactattggataaacgagaaaaatgaaaatttatcgtttcctggaggctattgtccaactgttggtgtcggtggtcatttctcaggcgggggctacggagcattgatgcgaaactacggactagcagctgataacattatagacgcccatctcgtgaatgtggatggtaaagttcttgatagaaagagcatgggtgaagatttgttttgggcgatcagaggcggtggaggggaaaactttggtattattgcggcttggaaaataaagctggtcgcagttccctcgaaagtaacaatcttttctgtaaagaaaaatatggaaatacatgggttggtcaagttattcaataaatggcaaaacattgcttataagtatgataaagacctcttactgatgactcattttattacgaggaatattaccgacaatcacggtaagaataaaactacagtgcacggttacttttcttcaattttccatggtggcgttgactctctagtagatttaatgaacaaaagtttccctgagttagggatcaagaaagaagattgtaaagaattatcttggatcgacacaaccatattcttttcgggtgttgttaactataataccgcaaactttaaaaaggaaattttgttagatcgctctgctggaaagaaaacagcatttagtatcaaacttgactatgtaaagaaaccgatacccgagactgccatggttaagatacttgagaagctatacgaagaggatgtgggagtcggcatgtacgttctctacccttacggcggtataatggatgaaatttcagaatccgcaatcccattcccacacagagcaggtattatgtatgaactgtggtatactgcctcatgggagaaacaagaagataacgaaaaacacattaattgggtccgtagcgtctacaatttcactacaccatatgtatccaagaacccgagattggcttacttgaattatagagacttggatctaggaaaaaataatcctgagagcccgaataattatacacaggcaaggatttggggcgagaagtatttcggcaagaacttcaacagattagtaaaagttaagaccaaagttgaccccaataacttttttagaaatgaacaaagtatccctccactcccaccacatcatcat

SEQ ID NO: 443 - DNA, 1551 bp, Artificial Sequence
  Synthetic
aatccccaggagaactttcttaagtgtttcagtcaatatatcccaaataacccggcgaatccgaaattagtatacacgcaaaatgatcagctatattccagcattctgaatagtaccattcaaaacttgcgctttacttcggacacaactccaaagcctttagtcatagttactccttcaaatgtgtcccatattcaggctacaatcctctgctctaaaaaagttgggttgcaaatacgtactagatcaggaggccacgatgccgaaggtatgtcttatatctcccaagtgccattcgttattgtcgacttgaggaacatgcattctattaagattgatgtacactcccagaccgcatgggttgaagctggtgccacattaggtgaagtatactattggataaacgagaaaaatgaaaatttatcgtttcctggaggctattgtccaactgttggtgtcggtggtcatttctcaggcgggggctacggagcattgatgcgaaactacggactagcagctgataacattatagacgcccatctcgtgaatgtggatggtaaagttcttgatagaaagagcatgggtgaagatttgttttgggcgatcagaggcggtggaggggaaaactttggtattattgcggcttggaaaataaagctggtcgcagttccctcgaaagtaacaatcttttctgtaaagaaaaatatggaaatacatgggttggtcaagttattcaataaatggcaaaacattgcttataagtatgataaagacctcttactgatgactcattttattacgaggaatattaccgacaatcacggtaagaataaaactacagtgcacggttacttttcttcaattttccatggtggcgttgactctctagtagatttaatgaacaaaagtttccctgagttagggatcaagaaagaggattgtaaagaactatcttggatcgacacaaccatattctattcgggtgttgttaactataataccgcaaactttaaaaaggaaattttgttagatcgctctgctggaaagaaaacagcatttagtatcaaacttgactatgtaaagaaaccgatacccgagactgccatggttaagatacttgagaagctatacgaagaggatgtgggagtcggcatgtacgttctctacccttacggcggtataatggatgaaatttcagaatccgcaatcccattcccacacagagcaggtattatgtatgaactgtggtatactgcctcatgggagaaacaagaagataacgaaaaacacattaattgggtccgtagcgtctacaatttcactacaccatatgtatcccaaaacccgagattggcttacttgaattatagagacttggatctaggaaaaaataatccagaaagcccgaataattatacacaggcaaggatttggggcgagaagtatttcggcaagaacttcaacagattagtaaaagttaagaccaaagttgaccccaataacttttttagaaatgaacaaagtatccctccactcccaccacatcatcat

SEQ ID NO: 444 - DNA, 1551 bp, Artificial Sequence
  Synthetic
aatccccaggagaactttcttaagtgtttcagtcaatacatcccaacgaacccgaccaatgctaaattagtatacacgcaaaatgattctttttatagcagcattctgaatagtaccattcaaaacttgcgctttacatcggacacaactccaaagcctttagtcataataactcctctaaatgtttcccatattcagggcacaatcctctgctctaaaaaagttgggttgcaaatacgtactagatcaggaggccacgatgccgaaggtatgtcttatatctcccaagtgccattcgttgtcgtcgacttgaggaacatgcattctattaagattgatgtagaatcccagaccgcatgggttgaagctggtgccacattaggtgaagtatactattggataaacgagaaaaatgaaaatttatcgtttcctggaggctattgtccaactgttggtgtcggtggtcatttctcaggcgggggctacggagcattgatgcgaaactacggactagcagctgataacattatagacgcccatctcgtgaatgtggatggtaaagttcttgatagaaagagcatgggtgaagatttgttttgggcgatcagaggcggtggaggggaaaactttggtattattgcggcttggaaaataaagctggtcgcagttccctcgaaagtaacaatcttttctgtaaagaaaaatatggaaatacatgggttggtcaagttattcaataaatggcaaaacattgcttataagtatgataaagacctcgttctgatgactcattttattacgaaaaatattaccgacaatcacggtaagaataaaactacagtgcacggttacttttcttcaattttccatggtggcgttgactctctagtagatttaatgaacaaaagtttccctgagttagggatcaagaaaacggattgtaaagaattttcttggatcgacacaaccatattctattcgggtgttgttaactttaataccgcaaactttaaaaaggaaattttgttagatcgctctgctggaaagaaaacagcatttagtatcaaacttgactatgtaaagaaaccgatacccgagactgccatggttaagatacttgagaagctatacgaagaggatgtgggagctggcatgtacgttctctacccttacggcggtataatggaagaaatttcagaatccgcaatcccattcccacacagagcaggtattatgtatgaactgtggtatactgcctcatgggagaaacaagaagataacgaaaaacacattaattgggtccgtagcgtctacaatttcactacaccatatgtatccaaaaacccgagattggcttacttgaattatagagacttggatctaggaaaaaataatgaggaaagcccgaataattatacacaggcaaggatttggggcgagaagtatttcggcaagaacttcaacagattagtaaaagttaagaccaaagttgaccccaataacttttttagaaatgaacaaagtatccctccactcccacttaggcatcat

SEQ ID NO: 445 - DNA, 1551 bp, Artificial Sequence
  Synthetic
aatccccaagagaactttcttaagtgtttcagtcagtatatcccaaataacgtggcgaatccgaaattagtatacacgcaacacgatcagctatatatgagcattctgaatagtaccattcaaaacttgcgctttacttcgaatacaactccaaagcctttagtcatagttactccttcaaatgtctcccatattcaggctacaatcctctgctctaaaaaagttgggttgcaaatacgtactagatcaggaggccacgatgccgaaggtatgtcttatatctcccaagtgccattcgttattgtcgacttgaggaacatgcattctattaagattgatgtacactcccagaccgcatgggttgaagctggtgccacattaggtgaactatactattggataaacgagaaaaatgaaaatttatcgtttcctggaggctattgtccaactgttggtgtcggtggtcatttctcaggcgggggctacggagcattgatgcgaaactacggactagcagctgataacattatagacgcccatctcgtgaatgtggatggtaaagttcttgatagaaagagcatgggtgaagatttgttttgggcgatcagaggcggtggaggggaaaactttggtattattgcggcttggaaaataaagctggtcgcagttccctcgaaaagcacaatcttttctgtaaagaaaaatatggaaatacatgggttggtcaagttattcaataaatggcaaaacattgcttataagtatgataaagacctcctactgatgactcattttattacgcgtaatattaccgacaatcacggtaagaataaaactacagtgcacggttacttttcttcaattttccatggtggcgttgactctctagtagatttaatgaacaaaagtttccctgagttagggatcaagaaagaggattgtaaagaactttcttggatcgacacaaccatattcttttcgggtgttgttaactacaataccgcaaactttaaaaaggaaattttgttagatcgctctgctggaaagaaaacagcatttagtatcaaacttgactatgtaaagaaaccgatacccgagactgccatggttaagatacttgagaagctatacgaagaggatgtgggagtaggcatgtacgttctctacccttacggcggtataatggatgaaatttcagaatccgcaatcccattcccacacagagcaggtattatgtatgaactgtggtatactgcctcatgggagaaacaagaagataacgaaaaacacattaattgggtccgtagcgtctacaatttcactacaccatatgtatcccaaaacccgagattggcttacttgaattatagagacttggatctaggaaaaaccaatccggaaagcccgaataattatacacaggcaaggatttggggcgagaagtatttcggcaagaacttcaacagattagtaaaagttaagaccaaagttgaccccaataacttttttagaaatgaacaaagtatccctccactcccaccacatcatcat

SEQ ID NO: 446 - DNA, 1551 bp, Artificial Sequence
  Synthetic
aatccccaggagaactttcttaagtgtttcagtaaacatatcccaaataacccggcgaatccgaaattagtatacacgcaacacgatcagctatattcaagcattctgaatagtaccattcaaaacttgcgctttacttcggacacaactccaaagcctttagtcatagttactccttcaaatgtgtcccatattcaggctacaatcctctgctctaaaaaagttgggttgcaaatacgtactagatcaggaggccacgatgccgaaggtatgtcttatatctcccaagtgccattcgttgtcgtcgacttgaggaacatgcattctattaagattgatgtacactcccagaccgcatgggttgaagctggtgccacattaggtgaagtatactattggataaacgagaaaaatgaaaatttatcgtttcctggaggctattgtccaactgttggtgtcggtggtcatttctcaggcgggggctacggagcattgatgcgaaactacggactagcagctgataacattatagacgcccatctcgtgaatgtggatggtaaagttcttgatagaaagagcatgggtgaagatttgttttgggcgatcagaggcggtggaggggaaaactttggtattattgcggcttggaaaataaagctggtccctgttccctcgaaagtaacaatcttttctgtaaagaaaaatatggaaatacatgggttggtcaagttattcaataaatggcaaaacattgcttataagtatgataaagacctcgttctgatgactcattttattacgaaaaatattaccgacaatcacggtaagaataaaactacagtgcacggttacttttcttcaattttccatggtggcgttgactctctagtagatttaatgaacaaaagtttccctgagttagggatcaagaaaacggattgtaaagaattttcttggatcgacacaaccatattctattcgggtgttgttaactttaataccgcaaactttaaaaaggaaattttgttagatcgctctgctggaaagaaaacagcatttagtatcaaacttgactatgtaaagaaaccgatacccgagactgccatggttaagatacttgagaagctatacgaagaggatgtgggagctggcatgtacgttctctacccttacggcggtataatggaagaaatttcagaatccgcaatcccattcccacacagagcaggtattatgtatgaactgtggtatactgcctcatgggagaaacaagaagataacgaaaaacacattaattgggtccgtagcgtctacaatttcactacaccatatgtatcccaaaacccgagattggcttacttgaattatagagacttggatctaggaaaaaacaatgaggaaagcccgaataattatacacaggcaaggatttggggcgagaagtatttcggcaagaacttcaacagattagtaaaagttaagaccaaagttgaccccaataacttttttagaaatgaacaaagtatccctccactcccaccacatcatcat

SEQ ID NO: 447 - DNA, 1551 bp, Artificial Sequence
  Synthetic
aatccccaggagaactttcttaagtgtttcagtcaatacatcccaacgaacgtgactaatgctaaattagtatacacgcaacacgatcagttttattctagcattctgaatagtaccattcaaaacttgcgctttacatcggacacaactccaaagcctttagtcataatcactcctctaaatgtttcccatattcagggtacaatcctctgctctaaaaaagttgggttgcaaatacgtactagatcaggaggccacgatgccgaaggtatgtcttatatctcccaagtgccattcgttgtcgtcgacttgaggaacatgcattctattaagattgatgtagaatcccagaccgcatgggttgaagctggtgccacattaggtgaagtatactattggataaacgagaaaaatgaaaatttatcgtttcctggaggctattgtccaactgttggtgtcggtggtcatttctcaggcgggggctacggagcattgatgcgaaactacggactagcagctgataacattatagacgcccatctcgtgaatgtggatggtaaagttcttgatagaaagagcatgggtgaagatttgttttgggcgatcagaggcggtggaggggaaaactttggtattattgcggcttggaaaataaagctggtcgcagttccctcgaaagtaacaatcttttctgtaaagaaaaatatggaaatacatgggttggtcaagttattcaataaatggcaaaacattgcttataagtatgataaagacctcgttctgatgactcattttattacgaaaaatattaccgacaatcacggtaagaataaaactacagtgcacggttacttttcttcaattttccatggtggcgttgactctctagtagatttaatgaacaaaagtttccctgagttagggatcaagaaagaagattgtaaagaattttcttggatcgacacaaccatattctattcgggtgttgttaactttaataccgcaaactttaaaaaggaaattttgttagatcgctctgctggaaagaaaacagcatttagtatcaaacttgactatgtaaagaaaccgatacccgagactgccatggttaagatacttgagaagctatacgaagaggatgtgggagctggcatgtacgttctctacccttacggcggtataatggatgaaatttcagaatccgcaatcccattcccacacagagcaggtattatgtatgaactgtggtatactgcctcatgggagaaacaagaagataacgaaaaacacattaattgggtccgtagcgtctacaatttcactacaccatatgtatcccaaaacccgagattggcttacttgaattatagagacttggatctaggaaaaaataatgaggagagcccgaataattatacacaggcaaggatttggggcgagaagtatttcggcaagaacttcaacagattagtaaaagttaagaccaaagttgaccccaataacttttttagaaatgaacaaagtatccctccactcccacttcggcatcat

SEQ ID NO: 448 - DNA, 1551 bp, Artificial Sequence
  Synthetic
aatccccaggagaactttcttaagtgtttcagtaaacatatcccaaataacgtggcgaatccgaaattagtatacacgcaacacgatcagctatatagcagcattctgaatagtaccattcaaaacttgcgctttacatcggacacaactccaaagcctttagtcatagttactccttcaaatgtttcccatattcaggctacaatcctctgctctaaaaaagttgggttgcaaatacgtactagatcaggaggccacgatgccgaaggtatgtcttatatctcccaagtgccattcgttgtcgtcgacttgaggaacatgcattctattaagattgatgtacactcccagaccgcatgggttgaagctggtgccacattaggtgaagtatactattggataaacgagaaaaatgaaaatttatcgtttcctggaggctattgtccaactgttggtgtcggtggtcatttctcaggcgggggctacggagcattgatgcgaaactacggactagcagctgataacattatagacgcccatctcgtgaatgtggatggtaaagttcttgatagaaagagcatgggtgaagatttgttttgggcgatcagaggcggtggaggggaaaactttggtattattgcggcttggaaaataaagctggtccctgttccctcgaaagtaacaatcttttctgtaaagaaaaatatggaaatacatgggttggtcaagttattcaataaatggcaaaacattgcttataagtatgataaagacctcgttctgatgactcattttattacgaaaaatattaccgacaatcacggtaagaataaaactacagtgcacggttacttttcttcaattttccatggtggcgttgactctctagtagatttaatgaacaaaagtttccctgagttagggatcaagaaaacggattgtaaagaattttcttggatcgacacaaccatattctattcgggtgttgttaactttaataccgcaaactttaaaaaggaaattttgttagatcgctctgctggaaagaaaacagcatttagtatcaaacttgactatgtaaagaaaccgatacccgagactgccatggttaagatacttgagaagctatacgaagaggatgtgggagctggcatgtacgttctctacccttacggcggtataatggaagaaatttcagaatccgcaatcccattcccacacagagcaggtattatgtatgaactgtggtatactgcctcatgggagaaacaagaagataacgaaaaacacattaattgggtccgtagcgtctacaatttcactacaccatatgtatcccaaaacccgagattggcttacttgaattatagagacttggatctaggaaaaaataatgaagccagcccgaataattatacacaggcaaggatttggggcgagaagtatttcggcaagaacttcaacagattagtaaaagttaagaccaaagttgaccccaataacttttttagaaatgaacaaagtatccctccactcccaccacatcatcat

SEQ ID NO: 449 - DNA, 1551 bp, Artificial Sequence
  Synthetic
aatccccaggagaactttcttaagtgtttcagtcaatacatcccaaataacgtggcgaatccgaaattagtatacacgcaacacgatcagctatatatgagcattctgaatagtaccattcaaaacttgcgctttacttcggacacaactccaaagcctttagtcatagttactccttcaaatgtttcccatattcaggctacaatcctctgctctaaaaaagttgggttgcaaatacgtactagatcaggaggccacgatgccgaaggtatgtcttatatctcccaagtgccattcgttattgtcgacttgaggaacatgcattctattaagattgatgtacactcccagaccgcatgggttgaagctggtgccacattaggtgaagtatactattggataaacgagaaaaatgaaaatttatcgtttcctggaggctattgtccaactgttggtgtcggtggtcatttctcaggcgggggctacggagcattgatgcgaaactacggactagcagctgataacattatagacgcccatctcgtgaatgtggatggtaaagttcttgatagaaagagcatgggtgaagatttgttttgggcgatcagaggcggtggaggggaaaactttggtattattgcggcttggaaaataaagctggtcgcagttccctcgaaaagcacaatcttttctgtaaagaaaaatatggaaataaatgggttggtcaagttattcaataaatggcaaaacattgcttataagtatgataaagacctccttctgatgactcattttattacgaggaatattaccgacaatcacggtaagaataaaactacagtgcacggttacttttcttcaattttccatggtggcgttgactctctagtagatttaatgaacaaaagtttccctgagttagggatcaagaaaacggattgtaaagaactttcttggatcgacacaaccatattctattcgggtgttgttaactacaataccgcaaactttaaaaaggaaattttgttagatcgctctgctggaaagaaaacagcatttagtatcaaacttgactatgtaaagaaaccgatacccgagactgccatggttaagatacttgagaagctatacgaagaggatgtgggagtaggcatgtacgttctctacccttacggcggtataatggatgaaatttcagaatccgcaatcccattcccacacagagcaggtattatgtatgaactgtggtatactgcctcatgggagaaacaagaagataacgaaaaacacattaattgggtccgtagcgtctacaatttcactacaccatatgtatcccaaaacccgagattggcttacttgaattatagagacttggatctaggaaaaaccaatccagagagcccgaataattatacacaggcaaggatttggggcgagaagtatttcggcaagaacttcaacagattagtaaaagttaagaccaaagttgaccccaataacttttttagaaatgaacaaagtatccctccactcccaccacatcatcat

SEQ ID NO: 450 - DNA, 1551 bp, Artificial Sequence
  Synthetic
aatccccaggagaactttcttaagtgtttcagtaaacatatcccaaataacgtggcgaatccgaaattagtatacacgcaaaacgatcagctatattcgagcattctgaatagtaccattcaaaacttgcgctttacttcggacacaactccaaagcctttagtcatagttactccttcaaatgtttcccatattcaggctacaatcctctgctctaaaaaagttgggttgcaaatacgtactagatcaggaggccacgatgccgaaggtatgtcttatatctcccaagtgccattcgttgtcgtcgacttgaggaacatgcattctattaagattgatgtacactcccagaccgcatgggttgaagctggtgccacattaggtgaagtatactattggataaacgagaaaaatgaaaatttatcgtttcctggaggctattgtccaactgttggtgtcggtggtcatttctcaggcgggggctacggagcattgatgcgaaactacggactagcagctgataacattatagacgcccatctcgtgaatgtggatggtaaagttcttgatagaaagagcatgggtgaagatttgttttgggcgatcagaggcggtggaggggaaaactttggtattattgcggcttggaaaataaagctggtcccagttccctcgaaagtaacaatcttttctgtaaagaaaaatatggaaatacatgggttggtcaagttattcaataaatggcaaaacattgcttataagtatgataaagacctcgttctgatgactcattttattacgaaaaatattaccgacaatcacggtaagaataaaactacagtgcacggttacttttcttcaattttccatggtggcgttgactctctagtagatttaatgaacaaaagtttccctgagttagggatcaagaaaacggattgtaaagaattttcttggatcgacacaaccatattctattcgggtgttgttaactttaataccgcaaactttaaaaaggaaattttgttagatcgctctgctggaaagaaaacagcatttagtatcaaacttgactatgtaaagaaaccgatacccgagactgccatggttaagatacttgagaagctatacgaagaggatgtgggagctggcatgtacgttctctacccttacggcggtataatggaagaaatttcagaatccgcaatcccattcccacacagagcaggtattatgtatgaactgtggtatactgcctcatgggagaaacaagaagataacgaaaaacacattaattgggtccgtagcgtctacaatttcactacaccatatgtatcccaaaacccgagattggcttacttgaattatagagacttggatctaggaaaaaataatgaggaaagcccgaataattatacacaggcaaggatttggggcgagaagtatttcggcaagaacttcaacagattagtaaaagttaagaccaaagttgaccccaataacttttttagaaatgaacaaagtatccctccactcccaccacatcatcat

SEQ ID NO: 451 - DNA, 1551 bp, Artificial Sequence
  Synthetic
aatccccaggagaactttcttaagtgtttcagtcaatacatcccaaataacgtggcgaatccgaaattagtatacacgcaacacgatcagctatatatgagcattctgaatagtaccattcaaaacttgcgctttacttcggacacaactccaaagcctttagtcatagttactccttcaaatgtttcccatattcaggctacaatcctctgctctaaaaaagttgggttgcaaatacgtactagatcaggaggccacgatgccgaaggtatgtcttatatctcccaagtgccattcgttattgtcgacttgaggaacatgcattctattaagattgatgtagaatcccagaccgcatgggttgaagctggtgccacattaggtgaagtatactattggataaacgagaaaaatgaaaatttatcgtttcctggaggctattgtccaactgttggtgtcggtggtcatttctcaggcgggggctacggagcattgatgcgaaactacggactagcagctgataacattatagacgcccatctcgtgaatgtggatggtaaagttcttgatagaaagagcatgggtgaagatttgttttgggcgatcagaggcggtggaggggaaaactttggtattattgcggcttggaaaataaagctggtcgcagttccctcgaaagtaacaatcttttctgtaaagaaaaatatggaaatacatgggttggtcaagttattcaataaatggcaaaacattgcttataagtatgataaagacctcttgctgatgactcattttattacgaggaatattaccgacaatcacggtaagaataaaactacagtgcacggttacttttcttcaattttccatggtggcgttgactctctagtagatttaatgaacaaaagtttccctgagttagggatcaagaaaacggattgtaaagaactttcttggatcgacacaaccatattctattcgggtgttgttaactataataccgcaaactttaaaaaggaaattttgttagatcgctctgctggaaagaaaacagcatttagtatcaaacttgactatgtaaagaaaccgatacccgagactgccatggttaagatacttgagaagctatacgaagaggatgtgggagtcggcatgtacgttctctacccttacggcggtataatggatgaaatttcagaatccgcaatcccattcccacacagagcaggtattatgtatgaactgtggtatactgcctcatgggagaaacaagaagataacgaaaaacacattaattgggtccgtagcgtctacaatttcactacaccatatgtatcccaaaacccgagattggcttacttgaattatagagacttggatctaggaaaaaccaatccggaaagcccgaataattatacacaggcaaggatttggggcgagaagtatttcggcaagaacttcaacagattagtaaaagttaagaccaaagttgaccccaataacttttttagaaatgaacaaagtatccctccactcccaccacatcatcat

SEQ ID NO: 452 - DNA, 1551 bp, Artificial Sequence
  Synthetic
aatccccaggagaactttcttaagtgtttcagtcaatatatcccaaataacgtggcgaatccgaaattagtatacacgcaacacgatcagctatatatgagcattctgaatagtaccattcaaaacttgcgctttacatcggacacaactccaaagcctttagtcatagttactccttcagatgtttcccatattcaggctacaatcctctgctctaaaaaagttgggttgcaaatacgtactagatcaggaggccacgatgccgaaggtatgtcttatatctcccaagtgccattcgttattgtcgacttgaggaacatgcattctattaagattgatgtagaatcccagaccgcatgggttgaagctggtgccacattaggtgaagtatactattggataaacgagaaaaatgaaaatttatcgtttcctggaggctattgtccaactgttggtgtcggtggtcatttctcaggcgggggctacggagcattgatgcgaaactacggactagcagctgataacattatagacgcccatctcgtgaatgtggatggtaaagttcttgatagaaagagcatgggtgaagatttgttttgggcgatcagaggcggtggaggggaaaactttggtattattgcggcttggaaaataaagctggtcgcagttccctcgaaaagcacaatcttttctgtaaagaaaaatatggaaatacatgggttggtcaagttattcaataaatggcaaaacattgcttataagtatgataaagacctcctactgatgactcattttattacgaggaatattaccgacaatcacggtaagaataaaactacagtgcacggttacttttcttcaattttccatggtggcgttgactctctagtagatttaatgaacaaaagtttccctgagttagggatcaagaaaacggattgtaaagaattgtcttggatcgacacaaccatattctattcgggtgttgttaactataataccgcaaactttaaaaaggaaattttgttagatcgctctgctggaaagaaaacagcatttagtatcaaacttgactatgtaaagaaaccgatacccgagactgccatggttaagatacttgagaagctatacgaagaggatgtgggagtaggcatgtacgttctctacccttacggcggtataatggatgaaatttcagaatccgcaatcccattcccacacagagcaggtattatgtatgaactgtggtatactgcctcatgggagaaacaagaagataacgaaaaacacattaattgggtccgtagcgtctacaatttcactacaccatatgtatcccaaaacccgagattggcttacttgaattatagagacttggatctaggaaaaaccaatcccgaaagcccgaataattatacacaggcaaggatttggggcgagaagtatttcggcaagaacttcaacagattagtaaaagttaagaccaaagttgaccccaataacttttttagaaatgaacaaagtatccctccactcccaccacatcatcat

SEQ ID NO: 453 - DNA, 1551 bp, Artificial Sequence
  Synthetic
aatccccaggagaactttcttaagtgtttcagtcaatacatcccaaataacgtggcgaatccgaaattagtatacacgcaacacgatcagctatatatgagcattctgaatagtaccattcaaaacttgcgctttacttcggacacaactccaaagcctttagtcatagttactccttcaaatgtttcccatattcaggctacaatcctctgctctaaaaaagttgggttgcaaatacgtactagatcaggaggccacgatgccgaaggtatgtcttatatctcccaagtgccattcgttattgtcgacttgaggaacatgcattctattaagattgatgtacactcccagaccgcatgggttgaagctggtgccacattaggtgaagtatactattggataaacgagaaaaatgaaaatttatcgtttcctggaggctattgtccaactgttggtgtcggtggtcatttctcaggcgggggctacggagcattgatgcgaaactacggactagcagctgataacattatagacgcccatctcgtgaatgtggatggtaaagttcttgatagaaagagcatgggtgaagatttgttttgggcgatcagaggcggtggaggggaaaactttggtattattgcggcttggaaaataaagctggtcgcagttccctcgaaaagcacaatcttttctgtaaagaaaaatatggaaatacatgggttggtcaagttattcaataaatggcaaaacattgcttataagtatgataaagacctccttctgatgactcattttattacgaggaatattaccgacaatcacggtaagaataaaactacagtgcacggttacttttcttcaattttccatggtggcgttgactctctagtagatttaatgaacaaaagtttccctgagttagggatcaagaaaacggattgtaaagaactgtcttggatcgacacaaccatattctattcgggtgttgttaactataataccgcaaactttaaaaaggaaattttgttagatcgctctgctggaaagaaaacagcatttagtatcaaacttgactatgtaaagaaaccgatacccgagactgccatggttaagatacttgagaagctatacgaagaggatgtgggagtaggcatgtacgttctcgtcccttacggcggtataatggatgaaatttcagaatccgcaatcccattcccacacagagcaggtattatgtatgaactgtggtatactgcctcatgggagaaacaagaagataacgaaaaacacattaattgggtccgtagcgtctacaatttcactacaccatatgtatcccaaaacccgagattggcttacttgaattatagagacttggatctaggaaaaaccaatccagaaagcccgaataattatacacaggcaaggatttggggcgagaagtatttcggcaagaacttcaacagattagtaaaagttaagaccaaagttgaccccaataacttttttagaaatgaacaaagtatccctccactcccaccacatcatcat

SEQ ID NO: 454 - DNA, 1551 bp, Artificial Sequence
  Synthetic
aatccccaagagaactttcttaagtgtttcagtcagtacatcccaaataacgtggcgaatccgaaattagtatacacgcaacacgatcagctatatatgagcattctgaatagtaccattcaaaacttgcgctttacttcggacacaactccaaagcctttagtcatagttactccttcaaatgtttcccatattcaggctacaatcctctgctctaaaaaagttgggttgcaaatacgtactagatcaggaggccacgatgccgaaggtatgtcttatatctcccaagtgccattcgttatagtcgacttgaggaacatgcattctattaagattgatgtacactcccagaccgcatgggttgaagctggtgccacattaggtgaagtatactattggataaacgagaaaaatgaaaatttatcgtttcctggaggctattgtccaactgttggtgtcggtggtcatttctcaggcgggggctacggagcattgatgcgaaactacggactagcagctgataacattatagacgcccatctcgtgaatgtggatggtaaagttcttgatagaaagagcatgggtgaagatttgttttgggcgatcagaggcggtggaggggaaaactttggtattattgcggcttggaaaataaagctggtcgcagttccctcgaaaagcacaatcttttctgtaaagaaaaatatggaaatacatgggttggtcaagttattcaataaatggcaaaacattgcttataagtatgataaagacctcctactgatgactcattttattacgagaaatattaccgacaatcacggtaagaataaaactacagtgcacggttacttttcttcaattttccatggtggcgttgactctctagtagatttaatgaacaaaagtttccctgagttagggatcaagaaaacggattgtaaagaattatcttggatcgacacaaccatattctattcgggtgttgttaactataataccgcaaactttaaaaaggaaattttgttagatcgctctgctggaaagaaaacagcatttagtatcaaacttgactatgtaaagaaaccgatacccgagactgccatggttaagatacttgagaagctatacgaagaggatgtgggagttggcatgtacgttctctacccttacggcggtataatggatgaaatttcagaatccgcaatcccattcccacacagagcaggtattatgtatgaactgtggtatactgcctcatgggagaaacaagaagataacgaaaaacacattaattgggtccgtagcgtctacaatttcactacaccatatgtatcccaaaacccgagattggcttacttgaattatagagacttggatctaggaatgaccaatcctgagagcccgaataattatacacaggcaaggatttggggcgagaagtatttcggcaagaacttcaacagattagtaaaagttaagaccaaagttgaccccaataacttttttagaaatgaacaaagtatccctccactcccaccacatcatcat

SEQ ID NO: 455 - DNA, 1551 bp, Artificial Sequence
  Synthetic
aatccccaggagaactttcttaagtgtttcagtcaatatatcccaactaaccctaccaatgcaaaattagtatacacgcaaaatgatcagttttattccagcattctgaatagtaccattcaaaacttgcgctttacatcggacacaactccaaagcctttagtcataatcactcctcttaatgtttcccatattcaggggacaatcctctgctctaaaaaagttgggttgcaaatacgtactagatcaggaggccacgatgccgaaggtatgtcttatatctcccaagtgccattcgttgtcgtcgacttgaggaacatgcattctattaagattgatgtacactcccagaccgcatgggttgaagctggtgccacattaggtgaagtatactattggataaacgagaaaaatgaaaatttatcgtttcctggaggctattgtccaactgttggtgtcggtggtcatttctcaggcgggggctacggagcattgatgcgaaactacggactagcagctgataacattatagacgcccatctcgtgaatgtggatggtaaagttcttgatagaaagagcatgggtgaagatttgttttgggcgatcagaggcggtggaggggaaaactttggtattattgcggcttggaaaataaagctggtcgcagttccctcgaaagtaacaatcttttctgtaaagaaaaatatggaaatacatgggttggtcaagttattcaataaatggcaaaacattgcttataagtatgataaagacctcgttctgatgactcattttattacgaaaaatattaccgacaatcacggtaagaataaaactacagtgcacggttacttttcttcaattttccatggtggcgttgactctctagtagatttaatgaacaaaagtttccctgagttagggatcaagaaaacggattgtaaagaattttcttggatcgacacaaccatattctattcgggtgttgttaactttaataccgcaaactttaaaaaggaaattttgttagatcgctctgctggaaagaaaacagcatttagtatcaaacttgactatgtaaagaaaccgatacccgagactgccatggttaagatacttgagaagctatacgaagaggatgtgggagctggcatgtacgttctctacccttacggcggtataatggaagaaatttcagaatccgcaatcccattcccacacagagcaggtattatgtatgaactgtggtatactgcctcatgggagaaacaagaagataacgaaaaacacattaattgggtccgtagcgtctacaatttcactacaccatatgtatccaagaacccgagattggcttacttgaattatagagacttggatctaggaaaaaacaatgaagaaagcccgaataattatacacaggcaaggatttggggcgagaagtatttcggcaagaacttcaacagattagtaaaagttaagaccaaagttgaccccaataacttttttagaaatgaacaaagtatccctccactcccactgcgtcatcat

SEQ ID NO: 456 - DNA, 1551 bp, Artificial Sequence
  Synthetic
aatcccagggagaactttcttaagtgtttcagtaaacatatcccaaataacccggcgaatccgaaattagtatacacgcaaaacgatcagctatatatgagcattctgaatagtaccattcaaaacttgcgctttacttcggacacaactccaaagcctttagtcatagttactccttcaaatgtgtcccatattcaggctacaatcctctgctctaaaaaagttgggttgcaaatacgtactagatcaggaggccacgatgccgaaggtatgtcttatatctcccaagtgccattcgttgtcgtcgacttgaggaacatgcattctattaagattgatgtacactcccagaccgcatgggttgaagctggtgccacattaggtgaagtatactattggataaacgagaaaaatgaaaatttatcgtttcctggaggctattgtccaactgttggtgtcggtggtcatttctcaggcgggggctacggagcattgatgcgaaactacggactagcagctgataacattatagacgcccatctcgtgaatgtggatggtaaagttcttgatagaaagagcatgggtgaagatttgttttgggcgatcagaggcggtggaggggaaaactttggtattattgcggcttggaaaataaagctggtccccgttccctcgaaagtaacaatcttttctgtaaagaaaaatatggaaatacatgggttggtcaagttattcaataaatggcaaaacattgcttataagtatgataaagacctcgttctgatgactcattttattacgaaaaatattaccgacaatcacggtaagaataaaactacagtgcacggttacttttcttcaattttccatggtggcgttgactctctagtagatttaatgaacaaaagtttccctgagttagggatcaagaaaacggattgtaaagaattttcttggatcgacacaaccatattctattcgggtgttgttaactttaataccgcaaactttaaaaaggaaattttgttagatcgctctgctggaaagaaaacagcatttagtatcaaacttgactatgtaaagaaaccgatacccgagactgccatggttaagatacttgagaagctatacgaagaggatgtgggagctggcatgtacgttctctacccttacggcggtataatggaagaaatttcagaatccgcaatcccattcccacacagagcaggtattatgtatgaactgtggtatactgcctcatgggagaaacaagaagataacgaaaaacacattaattgggtccgtagcgtctacaatttcactacaccatatgtatccaaaaacccgagattggcttacttgaattatagagacttggatctaggaaaaaataatgaagaaagcccgaataattatacacaggcaaggatttggggcgagaagtatttcggcaagaacttcaacagattagtaaaagttaagaccaaagttgaccccaataacttttttagaaatgaacaaagtatccctccactcccaccacatcatcat

SEQ ID NO: 457 - DNA, 1551 bp, Artificial Sequence
  Synthetic
aatcccagggagaactttcttaagtgtttcagtaaacatatcccaaataacgtggcgaatccgaaattagtatacacgcaacacgatcagctatattccagcattctgaatagtaccattcaaaacttgcgctttacttcggacacaactccaaagcctttagtcatagttactccttcaaatgtttcccatattcaggctacaatcctctgctctaaaaaagttgggttgcaaatacgtactagatcaggaggccacgatgccgaaggtatgtcttatatctcccaagtgccattcgttgtcgtcgacttgaggaacatgcattctattaagattgatgtacactcccagaccgcatgggttgaagctggtgccacattaggtgaagtatactattggataaacgagaaaaatgaaaatttatcgtttcctggaggctattgtccaactgttggtgtcggtggtcatttctcaggcgggggctacggagcattgatgcgaaactacggactagcagctgataacattatagacgcccatctcgtgaatgtggatggtaaagttcttgatagaaagagcatgggtgaagatttgttttgggcgatcagaggcggtggaggggaaaactttggtattattgcggcttggaaaataaagctggtcccggttccctcgaaagtaacaatcttttctgtaaagaaaaatatggaaatacatgggttggtcaagttattcaataaatggcaaaacattgcttataagtatgataaagacctcgttctgatgactcattttattacgaaaaatattaccgacaatcacggtaagaataaaactacagtgcacggttacttttcttcaattttccatggtggcgttgactctctagtagatttaatgaacaaaagtttccctgagttagggatcaagaaaacggattgtaaagaattttcttggatcgacacaaccatattctattcgggtgttgttaactttaataccgcaaactttaaaaaggaaattttgttagatcgctctgctggaaagaaaacagcatttagtatcaaacttgactatgtaaagaaaccgatacccgagactgccatggttaagatacttgagaagctatacgaagaggatgtgggagctggcatgtacgttctctacccttacggcggtataatggaagaaatttcagaatccgcaatcccattcccacacagagcaggtattatgtatgaactgtggtatactgcctcatgggagaaacaagaagataacgaaaaacacattaattgggtccgtagcgtctacaatttcactacaccatatgtatccaaaaacccgagattggcttacttgaattatagagacttggatctaggaaaaaataatgaagccagcccgaataattatacacaggcaaggatttggggcgagaagtatttcggcaagaacttcaacagattagtaaaagttaagaccaaagttgaccccaataacttttttagaaatgaacaaagtatccctccactcccaccacatcatcat

SEQ ID NO: 458 - DNA, 1551 bp, Artificial Sequence
  Synthetic
aatccccaagagaactttcttaagtgtttcagtcagtacatcccaaataacccggcgaatccgaaattaatttacacgcaaaacgattctctatatagcagcattctgaatagtaccattcaaaacttgcgctttacatcggacacaactccaaagcctttagtcatagttactccttcaaatgtatcccatattcaggctacaatcctctgctctaaaaaagttgggttgcaaatacgtactagatcaggaggccacgatgccgaaggtatgtcttatatctcccaagtgccattcgttatagtcgacttgaggaacatgcattctattaagattgatgtagaatcccagaccgcatgggttgaagctggtgccacattaggtgaagtatactattggataaacgagaaaaatgaaaatttatcgtttcctggaggctattgtccaactgttggtgtcggtggtcatttctcaggcgggggctacggagcattgatgcgaaactacggactagcagctgataacattatagacgcccatctcgtgaatgtggatggtaaagttcttgatagaaagagcatgggtgaagatttgttttgggcgatcagaggcggtggaggggaaaactttggtattattgcggcttggaaaataaagctggtcgcagttccctcgaaagtgacaatcttttctgtaaagaaaaatatggaaatacatgggttggtcaagttattcaataaatggcaaaacattgcttataagtatgataaagacctccttctgatgactcattttattacgaggaatattaccgacaatcacggtaagaataaaactacagtgcacggttacttttcttcaattttccatggtggcgttgactctctagtagatttaatgaacaaaagtttccctgagttagggatcaagaaaacggattgtaaagaattgtcttggatcgacacaattatattctattcgggtgttgttaactataataccgcaaactttaaaaaggaaattttgttagatcgctctgctggaaagaaaacagcatttagtatcaaacttgactatgtaaagaaaccgatacccgagactgccatggttaagatacttgagaagctatacgaagaggatgtgggagtaggcatgtacgttctctacccttacggcggtataatggatgaaatttcagaatccgcaatcccattcccacacagagcaggtattatgtatgaactgtggtatactgcctcatgggagaaacaagaagataacgaaaaacacattaattgggtccgtagcgtctacaatttcactacaccatatgtatccaaaaacccgagattggcttacttgaattatagagacttggatctaggaaaaaataatcccgaaagcccgaataattatacacaggcaaggatttggggcgagaagtatttcggcaagaacttcaacagattagtaaaagttaagaccaaagttgaccccaataacttttttagaaatgaacaaagtatccctccactcccaccacatcatcat

SEQ ID NO: 459 - DNA, 1551 bp, Artificial Sequence
  Synthetic
aatccccaggagaactttcttaagtgtttcagtcaatatatcccaacaaacgtgactaatgcaaaattagtatacacgcaacacgatcagttttatatgagcattctgaatagtaccattcaaaacttgcgctttacttcggacacaactccaaagcctttagtcataataactcctctcaatgtttcccatattcaggggacaatcctctgctctaaaaaagttgggttgcaaatacgtactagatcaggaggccacgatgccgaaggtatgtcttatatctcccaagtgccattcgttgtcgtcgacttgaggaacatgcattctattaagattgatgtacactcccagaccgcatgggttgaagctggtgccacattaggtgaagtatactattggataaacgagaaaaatgaaaatttatcgtttcctggaggctattgtccaactgttggtgtcggtggtcatttctcaggcgggggctacggagcattgatgcgaaactacggactagcagctgataacattatagacgcccatctcgtgaatgtggatggtaaagttcttgatagaaagagcatgggtgaagatttgttttgggcgatcagaggcggtggaggggaaaactttggtattattgcggcttggaaaataaagctggtcgcagttccctcgaaagtaacaatcttttctgtaaagaaaaatatggaaatacatgggttggtcaagttattcaataaatggcaaaacattgcttataagtatgataaagacctcgttctgatgactcattttattacgaaaaatattaccgacaatcacggtaagaataaaactacagtgcacggttacttttcttcaattttccatggtggcgttgactctctagtagatttaatgaacaaaagtttccctgagttagggatcaagaaagaagattgtaaagaattttcttggatcgacacaaccatattctattcgggtgttgttaactttaataccgcaaactttaaaaaggaaattttgttagatcgctctgctggaaagaaaacagcatttagtatcaaacttgactatgtaaagaaaccgatacccgagactgccatggttaagatacttgagaagctatacgaagaggatgtgggagctggcatgtacgttctctacccttacggcggtataatggaagaaatttcagaatccgcaatcccattcccacacagagcaggtattatgtatgaactgtggtatactgcctcatgggagaaacaagaagataacgaaaaacacattaattgggtccgtagcgtctacaatttcactacaccatatgtatccaagaacccgagattggcttacttgaattatagagacttggatctaggaaaaaataatgaggaaagcccgaataattatacacaggcaaggatttggggcgagaagtatttcggcaagaacttcaacagattagtaaaagttaagaccaaagttgaccccaataacttttttagaaatgaacaaagtatccctccactcccattaaggcatcat

SEQ ID NO: 460 - DNA, 1551 bp, Artificial Sequence
  Synthetic
aatccccaagagaactttcttaagtgtttcagtcagtatatcccaaataacgtggcgaatccgaaattagtatacacgcaacacgatcagctatatatgagcattctgaatagtaccattcaaaacttgcgctttacttcggacacaactccaaagcctttagtcatagttactccttcaaatgtttcccatattcaggctacaatcctctgctctaaaaaagttgggttgcaaatacgtactagatcaggaggccacgatgccgaaggtatgtcttatatctcccaagtgccattcgttatagtcgacttgaggaacatgcattctattaagattgatgtacactcccagaccgcatgggttgaagctggtgccacattaggtgaagtatactattggataaacgagaaaaatgaaaatttatcgtttcctggaggctattgtccaactgttggtgtcggtggtcatttctcaggcgggggctacggagcattgatgcgaaactacggactagcagctgataacattatagacgcccatctcgtgaatgtggatggtaaagttcttgatagaaagagcatgggtgaagatttgttttgggcgatcagaggcggtggaggggaaaactttggtattattgcggcttggaaaataaagctggtcgcagttccctcgaaagtaacaatcttttctgtaaagaaaaatatggaaatacatgggttggtcaagttattcaataaatggcaaaacattgcttataagtatgataaagacctcctactgatgactcattttattacgaggaatattaccgacaatcacggtaagaataaaactacagtgcacggttacttttcttcaattttccatggtggcgttgactctctagtagatttaatgaacaaaagtttccctgagttagggatcaagaaaacggattgtaaagaactttcttggatcgacacaaccatattctattcgggtgttgttaactacaataccgcaaactttaaaaaggaaattttgttagatcgctctgctggaaagaaaacagcatttagtatcaaacttgactatgtaaagaaaccgatacccgagactgccatggttaagatacttgagaagctatacgaagaggatgtgggagtaggcatgtacgttctctacccttacggcggtataatggatgaaatttcagaatccgcaatcccattcccacacagagcaggtattatgtatgaactgtggtatattgcctcatgggagaaacaagaagataacgaaaaacacattaattgggtccgtagcgtctacaatttcactacaccatatgtatcccaaaacccgagattggcttacttgaattatagagacttggatctaggaaaaaccaatccggaaagcccgaataattatacacaggcaaggatttggggcgagaagtatttcggcaagaacttcaacagattagtaaaagttaagaccaaagttgaccccaataacttttttagaaatgaacaaagtatccctccactcccaccacatcatcat

SEQ ID NO: 461 - DNA, 1551 bp, Artificial Sequence
  Synthetic
aatccccaggagaactttcttaagtgtttcagtaaacatatcccaaataacgtggcgaatccgaaattagtatacacgcaacacgatcagctatatatgagcattctgaatagtaccattcaaaacttgcgctttacatcggacacaactccaaagcctttagtcatagttactccttcaaatgtctcccatattcaggctacaatcctctgctctaaaaaagttgggttgcaaatacgtactagatcaggaggccacgatgccgaaggtatgtcttatatctcccaagtgccattcgttgtcgtcgacttgaggaacatgcattctattaagattgatgtacactcccagaccgcatgggttgaagctggtgccacattaggtgaagtatactattggataaacgagaaaaatgaaaatttatcgtttcctggaggctattgtccaactgttggtgtcggtggtcatttctcaggcgggggctacggagcattgatgcgaaactacggactagcagctgataacattatagacgcccatctcgtgaatgtggatggtaaagttcttgatagaaagagcatgggtgaagatttgttttgggcgatcagaggcggtggaggggaaaactttggtattattgcggcttggaaaataaagctggtcgacgttccctcgaaagttacaatcttttctgtaaagaaaaatatggaaatacatgggttggtcaagttattcaataaatggcaaaacattgcttataagtatgataaagacctcgttctgatgactcattttattacgaaaaatattaccgacaatcacggtaagaataaaactacagtgcacggttacttttcttcaattttccatggtggcgttgactctctagtagatttaatgaacaaaagtttccctgagttagggatcaagaaaacggattgtaaagaattttcttggatcgacacaaccatattctattcgggtgttgttaactttaataccgcaaactttaaaaaggaaattttgttagatcgctctgctggaaagaaaacagcatttagtatcaaacttgactatgtaaagaaaccgatacccgagactgccatggttaagatacttgagaagctatacgaagaggatgtgggagctggcatgtacgttctctacccttacggcggtataatggaagaaatttcagaatccgcaatcccattcccacacagagcaggtattatgtatgaactgtggtatactgcctcatgggagaaacaagaagataacgaaaaacacattaattgggtccgtagcgtctacaatttcactacaccatatgtatcccaaaacccgagattggcttacttgaattatagagacttggatctaggaaaaaccaatcatgccagcccgaataattatacacaggcaaggatttggggcgagaagtatttcggcaagaacttcaacagattagtaaaagttaagaccaaagttgaccccaataacttttttagaaatgaacaaagtatccctccactcccaccacatcatcat

SEQ ID NO: 462 - DNA, 1551 bp, Artificial Sequence
  Synthetic
aatccccaagagaactttcttaagtgtttcagtcagtacatcccaaataacgtggcgaatccgaaattagtatacacgcaacacgatcagctatattccagcattctgaatagtaccattcaaaacttgcgctttacttcggacacaactccaaagcctttagtcatagttactccttcaaatgtttcccatattcaggctacaatcctctgctctaaaaaagttgggttgcaaatacgtactagatcaggaggccacgatgccgaaggtatgtcttatatctcccaagtgccattcgttattgtcgacttgaggaacatgcattctattaagattgatgtacactcccagaccgcatgggttgaagctggtgccacattaggtgaagtatactattggataaacgagaaaaatgaaaatttatcgtttcctggaggctattgtccaactgttggtgtcggtggtcatttctcaggcgggggctacggagcattgatgcgaaactacggactagcagctgataacattatagacgcccatctcgtgaatgtggatggtaaagttcttgatagaaagagcatgggtgaagatttgttttgggcgatcagaggcggtggaggggaaaactttggtattattgcggcttggaaaataaagctggtcgcagttccctcgaaagtcacaatcttttctgtaaagaaaaatatggaaatacatgggttggtcaagttattcaataaatggcaaaacattgcttataagtatgataaagacctcttgctgatgactcattttattacgaggaatattaccgacaatcacggtaagaataaaactacagtgcacggttacttttcttcaattttccatggtggcgttgactctctagtagatttaatgaacaaaagtttccctgagttagggatcaagaaaacggattgtaaagaactttcttggatcgacacaaccatattctattcgggtgttgttaactataataccgcaaactttaaaaaggaaattttgttagatcgctctgctggaaagaaaacagcatttagtatcaaacttgactatgtaaagaaaccgatacccgagactgccatggttaagatacttgagaagctatacgaagaggatgtgggagtcggcatgtacgttctctacccttacggcggtataatggatgaaatttcagaatccgcaatcccattcccacacagagcaggtattatgtatgaactgtggtatactgcctcatgggagaaacaagaagataacgaaaaacacattaattgggtccgtagcgtctacaatttcactacaccatatgtatcccaaaacccgagattggcttacttgaattatagagacttggatctaggaaaaaccaatccggaaagcccgaataattatacacaggcaaggatttggggcgagaagtatttcggcaagaacttcaacagattagtaaaagttaagaccaaagttgaccccaataacttttttagaaatgaacaaagtatccctccactcccaccacatcatcat

SEQ ID NO: 463 - DNA, 1551 bp, Artificial Sequence
  Synthetic
aatccccaagagaactttcttaagtgtttcagtcagtatatcccaaataacccggcgaatccgaaattagtatacacgcaacacgattcgctatatatgagcattctgaatagtaccattcaaaacttgcgctttacttcggacacaactccaaagcctttagtcatagttactccttcaaatgtgtcccatattcaggctacaatcctctgctctaaaaaagttgggttgcaaatacgtactagatcaggaggccacgatgccgaaggtatgtcttatatctcccaagtgccattcgttattgtcgacttgaggaacatgcattctattaagattgatgtacactcccagaccgcatgggttgaagctggtgccacattaggtgaagtatactattggataaacgagaaaaatgaaaatttatcgtttcctggaggctattgtccaactgttggtgtcggtggtcatttctcaggcgggggctacggagcattgatgcgaaactacggactagcagctgataacattatagacgcccatctcgtgaatgtggatggtaaagttcttgatagaaagagcatgggtgaagatttgttttgggcgatcagaggcggtggaggggaaaactttggtattattgcggcttggaaaataaagctggtcgcagttccctcgaaagttacaatcttttctgtaaagaaaaatatggaaatacatgggttggtcaagttattcaataaatggcaaaacattgcttataagtatgataaagacctcctgctgatgactcattttattacgaggaatattaccgacaatcacggtaagaataaaactacagtgcacggttacttttcttcaattttccatggtggcgttgactctctagtagatttaatgaacaaaagtttccctgagttagggatcaagaaaacggattgtaaagaactgtcttggatcgacacaaccatattctattcgggtgttgttaactacaataccgcaaactttaaaaaggaaattttgttagatcgctctgctggaaagaaaacagcatttagtatcaaacttgactatgtaaagaaaccgatacccgagactgccatggttaagatacttgagaagctatacgaagaggatgtgggagtgggcatgtacgttctctacccttacggcggtataatggatgaaatttcagaatccgcaatcccattcccacacagagcaggtattatgtatgaactgtggtatactgcctcatgggagaaacaagaagataacgaaaaacacattaattgggtccgtagcgtctacaatttcactacaccatatgtatcccaaaacccgagattggcttacttgaattatagagacttggatctaggaaaaaataatcctgaaagcccgaataattatacacaggcaaggatttggggcgagaagtatttcggcaagaacttcaacagattagtaaaagttaagaccaaagttgaccccaataacttttttagaaatgaacaaagtatccctccactcccaccacatcatcat

SEQ ID NO: 464 - protein, 516 aa, Artificial Sequence; identical to SEQ ID NO: 193
  Synthetic

SEQ ID NO: 465 - protein, 516 aa, Artificial Sequence; identical to SEQ ID NO: 193
  Synthetic

SEQ ID NO: 466 - protein, 516 aa, Artificial Sequence; identical to SEQ ID NO: 193
  Synthetic

SEQ ID NO: 467 - protein, 516 aa, Artificial Sequence; identical to SEQ ID NO: 180
  Synthetic

SEQ ID NO: 468 - protein, 516 aa, Artificial Sequence; identical to SEQ ID NO: 180
  Synthetic

SEQ ID NO: 469 - protein, 516 aa, Artificial Sequence; identical to SEQ ID NO: 180
  Synthetic

SEQ ID NO: 470 - protein, 516 aa, Artificial Sequence; identical to SEQ ID NO: 180
  Synthetic

SEQ ID NO: 471 - protein, 516 aa, Artificial Sequence; identical to SEQ ID NO: 225
  Synthetic

SEQ ID NO: 472 - protein, 516 aa, Artificial Sequence; identical to SEQ ID NO: 225
  Synthetic

SEQ ID NO: 473 - protein, 516 aa, Artificial Sequence; identical to SEQ ID NO: 225
  Synthetic

SEQ ID NO: 474 - protein, 517 aa, Artificial Sequence; identical to SEQ ID NO: 155
  Synthetic

SEQ ID NO: 475 - protein, 517 aa, Artificial Sequence; identical to SEQ ID NO: 155
  Synthetic

SEQ ID NO: 476 - protein, 517 aa, Artificial Sequence; identical to SEQ ID NO: 155
  Synthetic

SEQ ID NO: 477 - protein, 517 aa, Artificial Sequence; identical to SEQ ID NO: 155
  Synthetic

SEQ ID NO: 478 - protein, 517 aa, Artificial Sequence; identical to SEQ ID NO: 164
  Synthetic

SEQ ID NO: 479 - protein, 517 aa, Artificial Sequence; identical to SEQ ID NO: 164
  Synthetic

SEQ ID NO: 480 - protein, 517 aa, Artificial Sequence; identical to SEQ ID NO: 164
  Synthetic

SEQ ID NO: 481 - protein, 517 aa, Artificial Sequence; identical to SEQ ID NO: 164
  Synthetic

SEQ ID NO: 482 - protein, 517 aa, Artificial Sequence; identical to SEQ ID NO: 164
  Synthetic

SEQ ID NO: 483 - protein, 517 aa, Artificial Sequence; identical to SEQ ID NO: 164
  Synthetic

SEQ ID NO: 484 - protein, 517 aa, Artificial Sequence; identical to SEQ ID NO: 164
  Synthetic

SEQ ID NO: 485 - protein, 517 aa, Artificial Sequence; identical to SEQ ID NO: 164
  Synthetic

SEQ ID NO: 486 - protein, 517 aa, Artificial Sequence; identical to SEQ ID NO: 164
  Synthetic

SEQ ID NO: 487 - protein, 517 aa, Artificial Sequence; identical to SEQ ID NO: 164
  Synthetic

SEQ ID NO: 488 - protein, 517 aa, Artificial Sequence
  Synthetic
NPQENFLKCFSQYIPNNVANPKLVYTQNDQLYSSILNSTIQNLRFTSDTTPKPLVIVTPSNVSHIQATILCSKKVGLQIRTRSGGHDAEGMSYISQVPFVIVDLRNMHSIKIDVHSQTAWVEAGATLGEVYYWINEKNENLSFPGGYCPTVGVGGHFSGGGYGALMRNYGLAADNIIDAHLVNVDGKVLDRKSMGEDLFWAIRGGGGENFGIIAAWKIKLVAVPSKVTIFSVKKNMEIHGLVKLFNKWQNIAYKYDKDLLLFTHFITRNITDNHGKNKTTVHGYFSSIFHGGVDSLVDLMNKSFPELGIKKEDCKELSWIDTIIFYSGVVNYNTANFKKEILLDRSAGKKTAFSIKLDYVKKPIPETAMVKILEKLYEEDVGVGMYVLYPYGGIMDEISESAIPFPHRAGIMYELWYTASWEKQEDNEKHINWVRSVYNFTTPYVSKNPRLAYLNYRDLDLGKNNPESPNNYTQARIWGEKYFGKNFNRLVKVKTKVDPNNFFRNEQSIPPLPPHHH

SEQ ID NO: 489 - protein, 517 aa, Artificial Sequence
  Synthetic
NPQENFLKCFSQYIPNNPANPKLVYTQHDQLYSSILNSTIQNLRFTSDTTPKPLVIVTPSNVSHIQATILCSKKVGLQIRTRSGGHDAEGMSYISQVPFVIVDLRNMHSIKIDVHSQTAWVEAGATLGEVYYWINEKNENLSFPGGYCPTVGVGGHFSGGGYGALMRNYGLAADNIIDAHLVNVDGKVLDRKSMGEDLFWAIRGGGGENFGIIAAWKIKLVAVPSKVTIFSVKKNMEIHGLVKLFNKWQNIAYKYDKDLLLFTHFITRNITDNHGKNKTTVHGYFSSIFHGGVDSLVDLMNKSFPELGIKKEDCKELSWIDTTIFYSGVVNYNTANFKKEILLDRSAGKKTAFSIKLDYVKKPIPETAMVKILEKLYEEDVGVGMYVLYPYGGIMDEISESAIPFPHRAGIMYELWYTASWEKQEDNEKHINWVRSVYNFTTPYVSQNPRLAYLNYRDLDLGKNNPESPNNYTQARIWGEKYFGKNFNRLVKVKTKVDPNNFFRNEQSIPPLPPHHH

SEQ ID NO: 490 - protein, 517 aa, Artificial Sequence
  Synthetic
NPRENFLKCFSKHIPNNVANPKLVYTQHDQLYMSILNSTIQNLRFTSDTTPKPLVIVTPSNVSHIQATILCSKKVGLQIRTRSGGHDAEGMSYISQVPFVVVDLRNMHSIKIDVHSQTAWVEAGATLGEVYYWINEKNENLSFPGGYCPTVGVGGHFSGGGYGALMRNYGLAADNIIDAHLVNVDGKVLDRKSMGEDLFWAIRGGGGENFGIIAAWKIKLVDVPSKVTIFSVKKNMEIHGLVKLFNKWQNIAYKYDKDLVLMTHFITKNITDNHGKNKTTVHGYFSSIFHGGVDSLVDLMNKSFPELGIKKTDCKEFSWIDTTIFYSGVVNFNTANFKKEILLDRSAGKKTAFSIKLDYVKKPIPETAMVKILEKLYEEDVGAGMYVLYPYGGIMEEISESAIPFPHRAGIMYELWYTASWEKQEDNEKHINWVRSVYNFTTPYVSQNPRLAYLNYRDLDLGKTNEASPNNYTQARIWGEKYFGKNFNRLVKVKTKVDPNNFFRNEQSIPPLPPHHH

SEQ ID NO: 491 - protein, 517 aa, Artificial Sequence
  Synthetic
NPRENFLKCFSKHIPNNVANPKLVYTQHDQLYMSILNSTIQNLRFISDTTPKPLVIVTPSNNSHIQATILCSKKVGLQIRTRSGGHDAEGMSYISQVPFVVVDLRNMHSIKIDVHSQTAWVEAGATLGEVYYWINEKNENLSFPGGYCPTVGVGGHFSGGGYGALMRNYGLAADNIIDAHLVNVDGKVLDRKSMGEDLFWAIRGGGGENFGIIAAWKIKLVDVPSKVTIFSVKKNMEIHGLVKLFNKWQNIAYKYDKDLVLMTHFITKNITDNHGKNKTTVHGYFSSIFHGGVDSLVDLMNKSFPELGIKKTDCKEFSWIDTTIFYSGVVNFNTANFKKEILLDRSAGKKTAFSIKLDYVKKPIPETAMVKILEKLYEEDVGAGMYVLYPYGGIMEEISESAIPFPHRAGIMYELWYTASWEKQEDNEKHINWVRSVYNFTTPYVSQNPRLAYLNYRDLDLGKTNEASPNNYTQARIWGEKYFGKNFNRLVKVKTKVDPNNFFRNEQSIPPLPPHHH

SEQ ID NO: 492 - protein, 517 aa, Artificial Sequence
  Synthetic
NPQENFLKCFSQYIPNNPANPKLVYTQNDQLYSSILNSTIQNLRFTSDTTPKPLVIVTPSNVSHIQATILCSKKVGLQIRTRSGGHDAEGMSYISQVPFVIVDLRNMHSIKIDVHSQTAWVEAGATLGEVYYWINEKNENLSFPGGYCPTVGVGGHFSGGGYGALMRNYGLAADNIIDAHLVNVDGKVLDRKSMGEDLFWAIRGGGGENFGIIAAWKIKLVAVPSKVTIFSVKKNMEIHGLVKLFNKWQNIAYKYDKDLLLFTHFITRNITDNHGKNKTTVHGYFSSIFHGGVDSLVDLMNKSFPELGIKKTDCKELSWIDTTIFYSGVVNYNTANFKKEILLDRSAGKKTAFSIKLDYVKKPIPETAMVKILEKLYEEDVGVGMYVLYPYGGIMDEISESAIPFPHRAGIMYELWYTASWEKQEDNEKHINWVRSVYNFTTPYVSQNPRLAYLNYRDLDLGKNNPESPNNYTQARIWGEKYFGKNFNRLVKVKTKVDPNNFFRNEQSIPPLPPHHH

SEQ ID NO: 493 - protein, 517 aa, Artificial Sequence
  Synthetic
NPQENFLKCFSQYIPNNPANPKLVYTQNDQLYSSILNSTIQNLRFTSDTTPKPLVIVTPSNVSHIQATILCSKKVGLQIRTRSGGHDAEGMSYISQVPFVIVDLRNMHSIKIDVESQTAWVEAGATLGEVYYWINEKNENLSFPGGYCPTVGVGGHFSGGGYGALMRNYGLAADNIIDAHLVNVDGKVLDRKSMGEDLFWAIRGGGGENFGIIAAWKIKLVAVPSKVTIFSVKKNMEIHGLVKLFNKWQNIAYKYDKDLLLFTHFITRNITDNHGKNKTTVHGYFSSIFHGGVDSLVDLMNKSFPELGIKKEDCKELSWIDTTIFFSGVVNYNTANFKKEILLDRSAGKKTAFSIKLDYVKKPIPETAMVKILEKLYEEDVGVGMYVLYPYGGIMDEISESAIPFPHRAGIMYELWYTASWEKQEDNEKHINWVRSVYNFTTPYVSKNPRLAYLNYRDLDLGKNNPESPNNYTQARIWGEKYFGKNFNRLVKVKTKVDPNNFFRNEQSIPPLPPHHH

SEQ ID NO: 494 - protein, 517 aa, Artificial Sequence
  Synthetic
NPQENFLKCFSQYIPNNPANPKLIYTQNDSLYSSILNSTIQNLRFTSDTTPKPLVIVTPSNVSHIQATILCSKKVGLQIRTRSGGHDAEGMSYISQVPFVIVDLRNMHSIKIDVHSQTAWVEAGATLGEVYYWINEKNENLSFPGGYCPTVGVGGHFSGGGYGALMRNYGLAADNIIDAHLVNVDGKVLDRKSMGEDLFWAIRGGGGENFGIIAAWKIKLVAVPSKVTIFSVKKNMEIHGLVKLFNKWQNIAYKYDKDLLLFTHFITRNITDNHGKNKTTVHGYFSSIFHGGVDSLVDLMNKSFPELGIKKEDCKELSWIDTTIFYSGVVNYNTANFKKEILLDRSAGKKTAFSIKLDYVKKPIPETAMVKILEKLYEEDVGVGMYVLYPYGGIMDEISESAIPFPHRAGIMYELWYTASWEKQEDNEKHINWVRSVYNFTTPYVSKNPRLAYLNYRDLDLGKNNPESPNNYTQARIWGEKYFGKNFNRLVKVKTKVDPNNFFRNEQSIPPLPPHHH

SEQ ID NO: 495 - protein, 517 aa, Artificial Sequence
  Synthetic
NPQENFLKCFSQYIPNNVANPKLVYTQNDSLYSSILNSTIQNLRFTSDTTPKPLVIVTPSNVSHIQATILCSKKVGLQIRTRSGGHDAEGMSYISQVPFVIVDLRNMHSIKIDVHSQTAWVEAGATLGEVYYWINEKNENLSFPGGYCPTVGVGGHFSGGGYGALMRNYGLAADNIIDAHLVNVDGKVLDRKSMGEDLFWAIRGGGGENFGIIAAWKIKLVAVPSKVTIFSVKKNMEIHGLVKLFNKWQNIAYKYDKDLLLFTHFITRNITDNHGKNKTTVHGYFSSIFHGGVDSLVDLMNKSFPELGIKKEDCKELSWIDTTIFYSGVVNYNTANFKKEILLDRSAGKKTAFSIKLDYVKKPIPETAMVKILEKLYEEDVGVGMYVLYPYGGIMDEISESAIPFPHRAGIMYELWYTASWEKQEDNEKHINWVRSVYNFTTPYVSKNPRLAYLNYRDLDLGKNNPESPNNYTQARIWGEKYFGKNFNRLVKVKTKVDPNNFFRNEQSIPPLPPHHH

SEQ ID NO: 496 - protein, 517 aa, Artificial Sequence
  Synthetic
NPQENFLKCFSQYIPNNVANPKLVYTQHDQLYSSILNSTIQNLRFTSDTTPKPLVIVTPSNVSHIQATILCSKKVGLQIRTRSGGHDAEGMSYISQVPFVIVDLRNMHSIKIDVHSQTAWVEAGATLGEVYYWINEKNENLSFPGGYCPTVGVGGHFSGGGYGALMRNYGLAADNIIDAHLVNVDGKVLDRKSMGEDLFWAIRGGGGENFGIIAAWKIKLVAVPSKVTIFSVKKNMEIHGLVKLFNKWQNIAYKYDKDLLLFTHFITRNITDNHGKNKTTVHGYFSSIFHGGVDSLVDLMNKSFPELGIKKEDCKELSWIDTTIFYSGVVNYNTANFKKEILLDRSAGKKTAFSIKLDYVKKPIPETAMVKILEKLYEEDVGVGMYVLYPYGGIMDEISESAIPFPHRAGIMYELWYTASWEKQEDNEKHINWVRSVYNFTTPYVSKNPRLAYLNYRDLDLGKNNPESPNNYTQARIWGEKYFGKNFNRLVKVKTKVDPNNFFRNEQSIPPLPPHHH

SEQ ID NO: 497 - protein, 517 aa, Artificial Sequence
  Synthetic
NPQENFLKCFSQYIPNNVANPKLVYTQHDSLYSSILNSTIQNLRFTSDTTPKPLVIVTPSNVSHIQATILCSKKVGLQIRTRSGGHDAEGMSYISQVPFVIVDLRNMHSIKIDVESQTAWVEAGATLGEVYYWINEKNENLSFPGGYCPTVGVGGHFSGGGYGALMRNYGLAADNIIDAHLVNVDGKVLDRKSMGEDLFWAIRGGGGENFGIIAAWKIKLVAVPSKVTIFSVKKNMEIHGLVKLFNKWQNIAYKYDKDLLLFTHFITRNITDNHGKNKTTVHGYFSSIFHGGVDSLVDLMNKSFPELGIKKEDCKELSWIDTTIFYSGVVNYNTANFKKEILLDRSAGKKTAFSIKLDYVKKPIPETAMVKILEKLYEEDVGVGMYVLYPYGGIMDEISESAIPFPHRAGIMYELWYTASWEKQEDNEKHINWVRSVYNFTTPYVSKNPRLAYLNYRDLDLGKNNPESPNNYTQARIWGEKYFGKNFNRLVKVKTKVDPNNFFRNEQSIPPLPPHHH

SEQ ID NO: 498 - protein, 517 aa, Artificial Sequence
  Synthetic
NPQENFLKCFSQYIPNNPANPKLVYTQNDSLYSSILNSTIQNLRFTSDTTPKPLVIVTPSNVSHIQATILCSKKVGLQIRTRSGGHDAEGMSYISQVPFVIVDLRNMHSIKIDVHSQTAWVEAGATLGELYYWINEKNENLSFPGGYCPTVGVGGHFSGGGYGALMRNYGLAADNIIDAHLVNVDGKVLDRKSMGEDLFWAIRGGGGENFGIIAAWKIKLVAVPSKVTIFSVKKNMEIHGLVKLFNKWQNIAYKYDKDLLLFTHFITRNITDNHGKNKTTVHGYFSSIFHGGVDSLVDLMNKSFPELGIKKEDCKELSWIDTTIFYSGVVNYNTANFKKEILLDRSAGKKTAFSIKLDYVKKPIPETAMVKILEKLYEEDVGVGMYVLYPYGGIMDEISESAIPFPHRAGIMYELWYTASWEKQEDNEKHINWVRSVYNFTTPYVSKNPRLAYLNYRDLDLGKNNPESPNNYTQARIWGEKYFGKNFNRLVKVKTKVDPNNFFRNEQSIPPLPPHHH

SEQ ID NO: 499 - protein, 517 aa, Artificial Sequence
  Synthetic
NPQENFLKCFSKHIPNNVANPKLVYTQHDQLYSSILNSTIQNLRFTSDTTPKPLVIVTPSNVSHIQATILCSKKVGLQIRTRSGGHDAEGMSYISQVPFVVVDLRNMHSIKIDVHSQTAWVEAGATLGEVYYWINEKNENLSFPGGYCPTVGVGGHFSGGGYGALMRNYGLAADNIIDAHLVNVDGKVLDRKSMGEDLFWAIRGGGGENFGIIAAWKIKLVPVPSKVTIFSVKKNMEIHGLVKLFNKWQNIAYKYDKDLVLMTHFITKNITDNHGKNKTTVHGYFSSIFHGGVDSLVDLMNKSFPELGIKKTDCKEFSWIDTTIFYSGVVNFNTANFKKEILLDRSAGKKTAFSIKLDYVKKPIPETAMVKILEKLYEEDVGAGMYVLYPYGGIMDEISESAIPFPHRAGIMYELWYTASWEKQEDNEKHINWVRSVYNFTTPYVSKNPRLAYLNYRDLDLGKNNEASPNNYTQARIWGEKYFGKNFNRLVKVKTKVDPNNFFRNEQSIPPLPPHHH

SEQ ID NO: 500 - protein, 517 aa, Artificial Sequence
  Synthetic
NPQENFLKCFSQYIPNNVANPKLVYTQHDQLYMSILNSTIQNLRFTSDTTPKPLVIVTPSNVSHIQATILCSKKVGLQIRTRSGGHDAEGMSYISQVPFVIVDLRNMHSIKIDVESQTAWVEAGATLGEVYYWINEKNENLSFPGGYCPTVGVGGHFSGGGYGALMRNYGLAADNIIDAHLVNVDGKVLDRKSMGEDLFWAIRGGGGENFGIIAAWKIKLVAVPSKVTIFSVKKNMEIHGLVKLFNKWQNIAYKYDKDLLLFTHFITRNITDNHGKNKTTVHGYFSSIFHGGVDSLVDLMNKSFPELGIKKTDCKELSWIDTTIFYSGVVNYNTANFKKEILLDRSAGKKTAFSIKLDYVKKPIPETAMVKILEKLYEEDVGVGMYVLYPYGGIMDEISESAIPFPHRAGIMYELWYTASWEKQEDNEKHINWVRSVYNFTTPYVSQNPRLAYLNYRDLDLGKNNPESPNNYTQARIWGEKYFGKNFNRLVKVKTKVDPNNFFRNEQSIPPLPPHHH

SEQ ID NO: 501 - protein, 517 aa, Artificial Sequence
  Synthetic
NPRENFLKCFSKHIPNNVANPKLVYTQNDQLYMSILNSTIQNLRFTSDTTPKPLVIVTPSNVSHIQATILCSKKVGLQIRTRSGGHDAEGMSYISQVPFVVVDLRNMHSIKIDVHSQTAWVEAGATLGEVYYWINEKNENLSFPGGYCPTVGVGGHFSGGGYGALMRNYGLAADNIIDAHLVNVDGKVLDRKSMGEDLFWAIRGGGGENFGIIAAWKIKLVDVPSKVTIFSVKKNMEIHGLVKLFNKWQNIAYKYDKDLVLMTHFITKNITDNHGKNKTTVHGYFSSIFHGGVDSLVDLMNKSFPELGIKKTDCKEFSWIDTTIFYSGVVNFNTANFKKEILLDRSAGKKTAFSIKLDYVKKPIPETAMVKILEKLYEEDVGAGMYVLYPYGGIMEEISESAIPFPHRAGIMYELWYTASWEKQEDNEKHINWVRSVYNFTTPYVSQNPRLAYLNYRDLDLGKNNEASPNNYTQARIWGEKYFGKNFNRLVKVKTKVDPNNFFRNEQSIPPLPPHHH

SEQ ID NO: 502 - protein, 517 aa, Artificial Sequence
  Synthetic
NPQENFLKCFSKHIPNNPANPKLVYTQHDQLYMSILNSTIQNLRFTSDTTPKPLVIVTPSNVSHIQATILCSKKVGLQIRTRSGGHDAEGMSYISQVPFVVVDLRNMHSIKIDVHSQTAWVEAGATLGEVYYWINEKNENLSFPGGYCPTVGVGGHFSGGGYGALMRNYGLAADNIIDAHLVNVDGKVLDRKSMGEDLFWAIRGGGGENFGIIAAWKIKLVDVPSKVTIFSVKKNMEIHGLVKLFNKWQNIAYKYDKDLVLMTHFITKNITDNHGKNKTTVHGYFSSIFHGGVDSLVDLMNKSFPELGIKKTDCKEFSWIDTTIFYSGVVNFNTANFKKEILLDRSAGKKTAFSIKLDYVKKPIPETAMVKILEKLYEEDVGAGMYVLYPYGGIMDEISESAIPFPHRAGIMYELWYTASWEKQEDNEKHINWVRSVYNFTTPYVSKNPRLAYLNYRDLDLGKNNEESPNNYTQARIWGEKYFGKNFNRLVKVKTKVDPNNFFRNEQSIPPLPPHHH

SEQ ID NO: 503 - protein, 517 aa, Artificial Sequence
  Synthetic
NPQENFLKCFSQYIPNNPANPKLVYTQNDSLYSSILNSTIQNLRFTSDTTPKPLVIVTPSNVSHIQATILCSKKVGLQIRTRSGGHDAEGMSYISQVPFVIVDLRNMHSIKIDVHSQTAWVEAGATLGEVYYWINEKNENLSFPGGYCPTVGVGGHFSGGGYGALMRNYGLAADNIIDAHLVNVDGKVLDRKSMGEDLFWAIRGGGGENFGIIAAWKIKLVAVPSKVTIFSVKKNMEIHGLVKLFNKWQNIAYKYDKDLLLFTHFITRNITDNHGKNKTTVHGYFSSIFHGGVDSLVDLMNKSFPELGIKKEDCKELSWIDTTIFYSGVVNYNTANFKKEILLDRSAGKKTAFSIKLDYVKKPIPETAMVKILEKLYEEDVGVGMYVLYPYGGIMDEISESAIPFPHRAGIMYELWYIASWEKQEDNEKHINWVRSVYNFTTPYVSKNPRLAYLNYRDLDLGKNNPESPNNYTQARIWGEKYFGKNFNRLVKVKTKVDPNNFFRNEQSIPPLPPHHH

SEQ ID NO: 504 - protein, 517 aa, Artificial Sequence
  Synthetic
NPRENFLKCFSKHIPNNPANPKLVYTQHDQLYMSILNSTIQNLRFTSDTTPKPLVIVTPSNVSHIQATILCSKKVGLQIRTRSGGHDAEGMSYISQVPFVVVDLRNMHSIKIDVHSQTAWVEAGATLGEVYYWINEKNENLSFPGGYCPTVGVGGHFSGGGYGALMRNYGLAADNIIDAHLVNVDGKVLDRKSMGEDLFWAIRGGGGENFGIIAAWKIKLVDVPSKVTIFSVKKNMEIHGLVKLFNKWQNIAYKYDKDLVLMTHFITKNITDNHGKNKTTVHGYFSSIFHGGVDSLVDLMNKSFPELGIKKTDCKEFSWIDTTIFYSGVVNFNTANFKKEILLDRSAGKKTAFSIKLDYVKKPIPETAMVKILEKLYEEDVGAGMYVLYPYGGIMEEISESAIPFPHRAGIMYELWYTASWEKQEDNEKHINWVRSVYNFTTPYVSQNPRLAYLNYRDLDLGKTNHASPNNYTQARIWGEKYFGKNFNRLVKVKTKVDPNNFFRNEQSIPPLPPHHH

SEQ ID NO: 505 - protein, 517 aa, Artificial Sequence
  Synthetic
NPRENFLKCFSKHIPNNVANPKLVYTQNDQLYSSILNSTIQNLRFTSDTTPKPLVIVTPSNVSHIQATILCSKKVGLQIRTRSGGHDAEGMSYISQVPFVVVDLRNMHSIKIDVHSQTAWVEAGATLGEVYYWINEKNENLSFPGGYCPTVGVGGHFSGGGYGALMRNYGLAADNIIDAHLVNVDGKVLDRKSMGEDLFWAIRGGGGENFGIIAAWKIKLVPVPSKVTIFSVKKNMEIHGLVKLFNKWQNIAYKYDKDLVLMTHFITKNITDNHGKNKTTVHGYFSSIFHGGVDSLVDLMNKSFPELGIKKTDCKEFSWIDTTIFYSGVVNFNTANFKKEILLDRSAGKKTAFSIKLDYVKKPIPETAMVKILEKLYEEDVGAGMYVLYPYGGIMEEISESAIPFPHRAGIMYELWYTASWEKQEDNEKHINWVRSVYNFTTPYVSQNPRLAYLNYRDLDLGKNNEASPNNYTQARIWGEKYFGKNFNRLVKVKTKVDPNNFFRNEQSIPPLPPHHH

SEQ ID NO: 506 - protein, 516 aa, Artificial Sequence
  Synthetic
NPRENFLKCFSQYIPNNATNLNLVYTQNNPLYMSVLNSTIQNLRFTSDTTPKPLVIVTPSHVSHIQATILCSKKVGLQIRTRSGGHDSEGMSYISQVPFVIVDLRNMRSIKIDVHSQTAWVEAGATLGEVYYWVNEKNENLSLAAGYCPTVCAGGHFGGGGYGPLMRNYGLAADNIIDAHLVNVNGKVLDRKSMGEDLFWALRGGGAESFGIIVAWKIRLVAVPKSTMFSVKKIMEIHELVKLVNKWQNIAYKYDKDLLLMTHFITRNITDNQGKNKTAIHTYFSSVFLGGVDSLVDLMNKSFPELGIKKTDCREMSWIDTIIFYSGVVNYDTDNFNKEILLDRSAGQNGAFKIKLDYVKKPIPESVFVQILEKLYEEDIGAGMYALYPYGGIMDEISESAIPFPHRAGILYELWYICSWEKQEDNEKHLNWIRNIYNFMTPYVSKNPRLAYLNYRDLDIGINDPKNPNNYTQARIWGEKYFGKNFDRLVKVKTLVDPNNFFRNEQSIPPLPRHRH

SEQ ID NO: 507 - protein, 516 aa, Artificial Sequence
  Synthetic
NPRENFLKCFSQYIPNNATNLNLVYTQNNPLYMSVLNSTIQNLRFTSDTTPKPLVIVTPSHVSHIQATILCSKKVGLQIRTRSGGHDSEGMSYISQVPFVIVDLRNMRSIKIDVHSQTAWVEAGATLGEVYYWVNEKNENLSLAAGYCPTVCAGGHFGGGGYGPLMRNYGLAADNIIDAHLVNVNGKVLDRKSMGEDLFWALRGGGAESFGIIVAWKIRLVAVPKSTMFSVKKIMEIHELVKLVNKWQNIAYKYDKDLLLMTHFITRNITDNQGKNKTAIHTYFSSVFLGGVDSLVDLMNKSFPELGIKKEDCRQMSWIDTIIFYSGVVNYDTDNFNKEILLDRSAGQNGAFKIKLDYVKKPIPESVFVQILEKLYEEDIGAGMYALYPYGGIMDEISESAIPFPHRAGILYELWYICSWEKQEDNEKHLNWIRNIYNFMTPYVSKNPRLAYLNYRDLDIGINDPKNPNNYTQARIWGEKYFGKNFDRLVKVKTLVDPNNFFRNEQSIPPLPRHRH

SEQ ID NO: 508 - protein, 516 aa, Artificial Sequence
  Synthetic
NPRENFLKCFSQYIPNNATNLKLVYTQNNPLYMSVLNSTIQNLRFTSDTTPKPLVIVTPSHVSHIQATILCSKKVGLQIRTRSGGHDAEGMSYISQVPFVIVDLRNMRSIKIDVHSQTAWVEAGATLGEVYYWVNEKNENLSLAAGYCPTVCAGGHFGGGGYGPLMRNYGLAADNIIDAHLVNVHGKVLDRKSMGEDLFWALRGGGAESFGIIVAWKIRLVAVPKSTMFSVKKIMEIHELVKLVNKWQNIAYKYDKDLLLMTHFITRNITDNQGKNKTAIHTYFSSVFLGGVDSLVDLMNKSFPELGIKKEDCRQLSWIDTIIFYSGVVNYDTDNFNKEILLDRSAGQNGAFKIKLDYVKKPIPESVFVQILEKLYEEDIGAGMYALYPYGGIMDEISESAIPFPHRAGILYELWYICSWEKQEDNEKHLNWIRNIYNFMTPYVSKNPRLAYLNYRDLDIGINDPKNPNNYTQARIWGEKYFGKNFDRLVKVKTLVDPNNFFRNEQSIPPLPRHRH

SEQ ID NO: 509 - protein, 516 aa, Artificial Sequence
  Synthetic
NPRENFLKCFSQYIPNNATNLKLVYTQNNPLYMSVLNSTIQNLRFTSDTTPKPLVIVTPSHVSHIQATILCSKKVGLQIRTRSGGHDAEGMSYISQVPFVIVDLRNMRSIKIDVHSQTAWVEAGATLGEVYYWVNEKNENLSLAAGYCPTVCAGGHFGGGGYGPLMRNYGLAADNIIDAHLVNVHGKVLDRKSMGEDLFWALRGGGAESFGIIVAWKIRLVAVPKSTMFSVKKIMEIHELVKLVNKWQNIAYKYDKDLLLMTHFITRNITDNQGKNKTAIHTYFSSVFLGGVDSLVDLMNKSFPELGIKKEDCRELSWIDTIIFYSGVVNYDTDNFNKEILLDRSAGQNGAFKIKLDYVKKPIPESVFVQILEKLYEEDIGAGMYALYPYGGIMDEISESAIPFPHRAGILYELWYICSWEKQEDNEKHLNWIRNIYNFMTPYVSKNPRLAYLNYRDLDIGINDPKNPNNYTQARIWGEKYFGKNFDRLVKVKTLVDPNNFFRNEQSIPPLPRHRH

SEQ ID NO: 510 - protein, 517 aa, Artificial Sequence
  Synthetic
NPRENFLKCFSQYIPNNAANPKLVYTQHDQLYMSVLNSTIQNLRFTSDTTPKPLVIVTPSNVSHIQATILCSKKVGLQIRTRSGGHDSEGMSYISQVPFVIVDLRNMRSIKIDVHSQTAWVEAGATLGEVYYWVNEKNENLSLAAGYCPTVCAGGHFGGGGYGPLMRNYGLAADNIIDAHLVNVHGKVLDRKSMGEDLFWALRGGGAESFGIIVAWKIRLVAVPSKSTMFSVKKIMEIHELVKLVNKWQNIAYKYDKDLLLMTHFITRNITDNQGKNKTAIHTYFSSVFLGGVDSLVDLMNKSFPELGIKKTDCRQLSWIDTIIFYSGVVNYDTDNFNKEILLDRSAGQNGAFKIKLDYVKKPIPESVFVQILEKLYEEDIGAGMYALYPYGGIMDEISESAIPFPHRAGILYELWYICSWEKQEDNEKHLNWIRNIYNFMTPYVSKNPRLAYLNYRDLDIGINDPKNPNNYTQARIWGEKYFGKNFDRLVKVKTLVDPNNFFRNEQSIPPLPRHRH

SEQ ID NO: 511 - protein, 516 aa, Artificial Sequence
  Synthetic
NPRENFLKCFSQYIPNNATNLKLVYTQNNPLYMSVLNSTIHNLRFTSDTTPKPLVIVTPSHVSHIQGTILCAKKVGLQIRTRSGGHDAEGMSYISQVPFVIVDLRNMRSIKIDVHSQTAWVEAGATLGEVYYWVNEKNENLSLAAGYCPTVCAGGHFGGGGYGPLMRNYGLAADNIIDAHLVNVNGKVLDRKSMGEDLFWALRGGGAESFGIIVAWKIRLVAVPKSTMFSVKKIMEIHELVKLVNKWQNIAYKYDKDLLLMTHFITRNITDNQGKNKTAIHTYFSSVFLGGVDSLVDLMNKSFPELGIKKTDCRQLSWIDTIIFYSGVVNYDTDNFNKEILLDRSAGQNGAFKIKLDYVKKPIPESVFVQILEKLYEEDIGAGMYALYPYGGIMDEISESAIPFPHRAGILYELWYICSWEKQEDNEKHLNWIRNIYNFMTPYVSKNPRLAYLNYRDLDIGINDPKNPNNYTQARIWGEKYFGKNFDRLVKVKTLVDPNNFFRNEQSIPPLPRHRH

SEQ ID NO: 512 - protein, 516 aa, Artificial Sequence
  Synthetic
NPRENFLKCFSQYIPNNATNLKLVYTQNNPLYMSVLNSTIHNLRFTSDTTPKPLVIVTPSHVSHIQATILCSKKVGLQIRTRSGGHDSEGMSYISQVPFVIVDLRNMRSIKIDVHSQTAWVEAGATLGEVYYWVNEKNENLSLAAGYCPTVCAGGHFGGGGYGPLMRNYGLAADNIIDAHLVNVNGKVLDRKSMGEDLFWALRGGGAESFGIIVAWKIRLVAVPKSTMFSVKKIMEIHELVKLVNKWQNIAYKYDKDLLLMTHFITRNITDNQGKNKTAIHTYFSSVFLGGVDSLVDLMNKSFPELGIKKEDCRELSWIDTIIFYSGVVNYDTDNFNKEILLDRSAGQNGAFKIKLDYVKKPIPESVFVQILEKLYEEDIGAGMYVLYPYGGIMDEISESAIPFPHRAGILYELWYICSWEKQEDNEKHLNWIRNIYNFMTPYVSKNPRLAYLNYRDLDIGINNPKNPNNYTQARIWGEKYFGKNFDRLVKVKTLVDPNNFFRNEQSIPPLPRHRH

SEQ ID NO: 513 - protein, 516 aa, Artificial Sequence
  Synthetic
NPRENFLKCFSQYIPNNATNLKLVYTQNNPLYMSVLNSTIQNLRFTSDTTPKPLVIVTPSHVSHIQATILCSKKVGLQIRTRSGGHDAEGMSYISQVPFVIVDLRNMRSIKIDVHSQTAWVEAGATLGEVYYWVNEKNENLSLAAGYCPTVCAGGHFGGGGYGPLMRNYGLAADNIIDAHLVNVNGKVLDRKSMGEDLFWALRGGGAESFGIIVAWKIRLVAVPKSTMFSVKKIMEIHELVKLVNKWQNIAYKYDKDLLLMTHFITRNITDNQGKNKTAIHTYFSSVFLGGVDSLVDLMNKSFPELGIKKEDCRELSWIDTIIFYSGVVNYDTDNFNKEILLDRSAGQNGAFKIKLDYVKKPIPESVFVQILEKLYEEDIGAGMYALYPYGGIMDEISESAIPFPHRAGILYELWYICSWEKQEDNEKHLNWIRNIYNFMTPYVSKNPRLAYLNYRDLDIGINDPKNPNNYTQARIWGEKYFGKNFDRLVKVKTLVDPNNFFRNEQSIPPLPRHRH

SEQ ID NO: 514 - protein, 516 aa, Artificial Sequence
  Synthetic
NPRENFLKCFSQYIPNNATNLNLVYTQNNPLYMSVLNSTIQNLRFTSDTTPKPLVIVTPSHVSHIQATILCSKKVGLQIRTRSGGHDSEGMSYISQVPFVIVDLRNMRSIKIDVHSQTAWVEAGATLGEVYYWVNEKNENLSLAAGYCPTVCAGGHFGGGGYGPLMRNYGLAADNIIDAHLVNVHGKVLDRKSMGEDLFWALRGGGAESFGIIVAWKIRLVAVPKSTMFSVKKIMEIHELVKLVNKWQNIAYKYDKDLLLMTHFITRNITDNQGKNKTAIHTYFSSVFLGGVDSLVDLMNKSFPELGIKKTDCRELSWIDTIIFYSGVVNYDTDNFNKEILLDRSAGQNGAFKIKLDYVKKPIPESVFVQILEKLYEEDIGAGMYALYPYGGIMDEISESAIPFPHRAGILYELWYICSWEKQEDNEKHLNWIRNIYNFMTPYVSKNPRLAYLNYRDLDIGINDPKNPNNYTQARIWGEKYFGKNFDRLVKVKTLVDPNNFFRNEQSIPPLPRHRH

SEQ ID NO: 515 - protein, 516 aa, Artificial Sequence
  Synthetic
NPRENFLKCFSQYIPNNATNLKLVYTQNNPLYMSVLNSTIHNLRFTSDTTPKPLVIVTPSHVSHIQATILCSKKVGLQIRTRSGGHDSEGMSYISQVPFVIVDLRNMRSIKIDVHSQTAWVEAGATLGEVYYWVNEKNENLSLAAGYCPTVCAGGHFGGGGYGPLMRNYGLAADNIIDAHLVNVHGKVLDRKSMGEDLFWALRGGGAESFGIIVAWKIRLVAVPKSTMFSVKKIMEIHELVKLVNKWQNIAYKYDKDLLLMTHFITRNITDNQGKNKTAIHTYFSSVFLGGVDSLVDLMNKSFPELGIKKEDCRQMSWIDTIIFYSGVVNYDTDNFNKEILLDRSAGQNGAFKIKLDYVKKPIPESVFVQILEKLYEEDIGAGMYVLYPYGGIMDEISESAIPFPHRAGILYELWYICSWEKQEDNEKHLNWIRNIYNFMTPYVSKNPRLAYLNYRDLDIGINDPKNPNNYTQARIWGEKYFGKNFDRLVKVKTLVDPNNFFRNEQSIPPLPRHRH

SEQ ID NO: 516 - protein, 517 aa, Artificial Sequence
  Synthetic
NPQENFLKCFSQYIPNNAANPKLVYTQHDQLYMSVLNSTIQNLRFTSDTTPKPLVIVTPSNVSHIQATILCSKKVGLQIRTRSGGHDSEGMSYISQVPFVIVDLRNMRSIKIDVHSQTAWVEAGATLGEVYYWVNEKNENLSLAAGYCPTVCAGGHFGGGGYGPLMRNYGLAADNIIDAHLVNVHGKVLDRKSMGEDLFWALRGGGAESFGIIVAWKIRLVAVPSKSTMFSVKKIMEIHELVKLVNKWQNIAYKYDKDLLLMTHFITRNITDNQGKNKTAIHTYFSSVFLGGVDSLVDLMNKSFPELGIKKTDCRQLSWIDTIIFYSGVVNYDTDNFNKEILLDRSAGQNGAFKIKLDYVKKPIPESVFVQILEKLYEEDIGAGMYALYPYGGIMDEISESAIPFPHRAGILYELWYICSWEKQEDNEKHLNWIRNIYNFMTPYVSKNPRLAYLNYRDLDIGINDPKNPNNYTQARIWGEKYFGKNFDRLVKVKTLVDPNNFFRNEQSIPPLPRHRH

SEQ ID NO: 517 - protein, 516 aa, Artificial Sequence
  Synthetic
NPRENFLKCFSQYIPNNATNLKLVYTQNNPLYMSVLNSTIHNLRFTSDTTPKPLVIVTPSHVSHIQATILCSKKVGLQIRTRSGGHDSEGMSYISQVPFVIVDLRNMRSIKIDVHSQTAWVEAGATLGEVYYWVNEKNENLSLAAGYCPTVCAGGHFGGGGYGPLMRNYGLAADNIIDAHLVNVHGKVLDRKSMGEDLFWALRGGGAESFGIIVAWKIRLVAVPKSTMFSVKKIMEIHELVKLVNKWQNIAYKYDKDLLLMTHFITRNITDNQGKNKTAIHTYFSSVFLGGVDSLVDLMNKSFPELGIKKEDCREMSWIDTIIFYSGVVNYDTDNFNKEILLDRSAGQNGAFKIKLDYVKKPIPESVFVQILEKLYEEDIGAGMYVLYPYGGIMDEISESAIPFPHRAGILYELWYICSWEKQEDNEKHLNWIRNIYNFMTPYVSKNPRLAYLNYRDLDIGINDPKNPNNYTQARIWGEKYFGKNFDRLVKVKTLVDPNNFFRNEQSIPPLPRHRH

SEQ ID NO: 518 - protein, 516 aa, Artificial Sequence
  Synthetic
NPRENFLKCFSQYIPNNATNLKLVYTQNNPLYMSVLNSTIHNLRFTSDTTPKPLVIVTPSHVSHIQATILCSKKVGLQIRTRSGGHDAEGMSYISQVPFVIVDLRNMRSIKIDVHSQTAWVEAGATLGEVYYWVNEKNENLSLAAGYCPTVCAGGHFGGGGYGPLMRNYGLAADNIIDAHLVNVHGKVLDRKSMGEDLFWALRGGGAESFGIIVAWKIRLVAVPKSTMFSVKKIMEIHELVKLVNKWQNIAYKYDKDLLLMTHFITRNITDNQGKNKTAIHTYFSSVFLGGVDSLVDLMNKSFPELGIKKEDCREMSWIDTIIFYSGVVNYDTDNFNKEILLDRSAGQNGAFKIKLDYVKKPIPESVFVQILEKLYEEDIGAGMYALYPYGGIMDEISESAIPFPHRAGILYELWYICSWEKQEDNEKHLNWIRNIYNFMTPYVSKNPRLAYLNYRDLDIGINDPKNPNNYTQARIWGEKYFGKNFDRLVKVKTLVDPNNFFRNEQSIPPLPRHRH

SEQ ID NO: 519 - protein, 516 aa, Artificial Sequence
  Synthetic
NPRENFLKCFSQYIPNNATNLNLVYTQNNPLYMSVLNSTIQNLRFTSDTTPKPLVIVTPSHVSHIQATILCSKKVGLQIRTRSGGHDSEGMSYISQVPFVIVDLRNMRSIKIDVHSQTAWVEAGATLGEVYYWVNEKNENLSLAAGYCPTVCAGGHFGGGGYGPLMRNYGLAADNIIDAHLVNVNGKVLDRKSMGEDLFWALRGGGAESFGIIVAWKIRLVAVPKSTMFSVKKIMEIHELVKLVNKWQNIAYKYDKDLLLMTHFITRNITDNQGKNKTAIHTYFSSVFLGGVDSLVDLMNKSFPELGIKKTDCREMSWIDTIIFYSGVVNYDTDNFNKEILLDRSAGQNGAFKIKLDYVKKPIPESVFVQILEKLYEEDIGAGMYVLYPYGGIMDEISESAIPFPHRAGILYELWYICSWEKQEDNEKHLNWIRNIYNFMTPYVSKNPRLAYLNYRDLDIGINDPKNPNNYTQARIWGEKYFGKNFDRLVKVKTLVDPNNFFRNEQSIPPLPRHRH

SEQ ID NO: 520 - protein, 516 aa, Artificial Sequence
  Synthetic
NPRENFLKCFSQYIPNNATNLNLVYTQNNPLYMSVLNSTIHNLRFTSDTTPKPLVIVTPSHVSHIQATILCSKKVGLQIRTRSGGHDAEGMSYISQVPFVIVDLRNMRSIKIDVHSQTAWVEAGATLGEVYYWVNEKNENLSLAAGYCPTVCAGGHFGGGGYGPLMRNYGLAADNIIDAHLVNVNGKVLDRKSMGEDLFWALRGGGAESFGIIVAWKIRLVAVPKSTMFSVKKIMEIHELVKLVNKWQNIAYKYDKDLLLMTHFITRNITDNQGKNKTAIHTYFSSVFLGGVDSLVDLMNKSFPELGIKKTDCRQMSWIDTIIFYSGVVNYDTDNFNKEILLDRSAGQNGAFKIKLDYVKKPIPESVFVQILEKLYEEDIGAGMYALYPYGGIMDEISESAIPFPHRAGILYELWYICSWEKQEDNEKHLNWIRNIYNFMTPYVSKNPRLAYLNYRDLDIGINDPKNPNNYTQARIWGEKYFGKNFDRLVKVKTLVDPDNFFRNEQSIPPLPRHRH

SEQ ID NO: 521 - protein, 516 aa, Artificial Sequence
  Synthetic
NPRENFLKCFSQYIPNNATNLNLVYTQNNPLYMSVLNSTIHNLRFTSDTTPKPLVIVTPSHVSHIQATILCSKKVGLQIRTRSGGHDSEGMSYISQVPFVIVDLRNMRSIKIDVHSQTAWVEAGATLGEVYYWVNEKNENLSLAAGYCPTVCAGGHFGGGGYGPLMRNYGLAADNIIDAHLVNVNGKVLDRKSMGEDLFWALRGGGAESFGIIVAWKIRLVAVPKSTMFSVKKIMEIHELVKLVNKWQNIAYKYDKDLLLMTHFITRNITDNQGKNKTAIHTYFSSVFLGGVDSLVDLMNKSFPELGIKKEDCRELSWIDTIIFYSGVVNYDTDNFNKEILLDRSAGQNGAFKIKLDYVKKPIPESVFVQILEKLYEEDIGAGMYVLYPYGGIMDEISESAIPFPHRAGILYELWYICSWEKQEDNEKHLNWIRNIYNFMTPYVSKNPRLAYLNYRDLDIGINNPKNPNNYTQARIWGEKYFGKNFDRLVKVKTLVDPNNFFRNEQSIPPLPRHRH

SEQ ID NO: 522 - protein, 516 aa, Artificial Sequence
  Synthetic
NPRENFLKCFSQYIPNNATNLKLVYTQNNPLYMSVLNSTIHNLRFTSDTTPKPLVIVTPSHVSHIQATILCSKKVGLQIRTRSGGHDSEGMSYISQVPFVIVDLRNMRSIKIDVHSQTAWVEAGATLGEVYYWVNEKNENLSLAAGYCPTVCAGGHFGGGGYGPLMRNYGLAADNIIDAHLVNVNGKVLDRKSMGEDLFWALRGGGAESFGIIVAWKIRLVAVPKSTMFSVKKIMEIHELVKLVNKWQNIAYKYDKDLLLMTHFITRNITDNQGKNKTAIHTYFSSVFLGGVDSLVDLMNKSFPELGIKKEDCRQLSWIDTIIFYSGVVNYDTDNFNKEILLDRSAGQNTAFKIKLDYVKKPIPESVFVQILEKLYEEDIGVGMYVLYPYGGIMDEISESAIPFPHRAGILYELWYVCSWEKQEDNEKHLNWIRNIYNFMTPYVSKNPRLAYLNYRDLDIGINDPKNPNNYTQARIWGEKYFGKNFDRLVKVKTLVDPNNFFRNEQSIPPLPRHRH

SEQ ID NO: 523 - protein, 516 aa, Artificial Sequence
  Synthetic
NPRENFLKCFSQYIPNNATNLKLVYTQNNPLYMSVLNSTIHNLRFTSDTTPKPLVIVTPSHVSHIQATILCSKKVGLQIRTRSGGHDAEGMSYISQVPFVIVDLRNMRSIKIDVHSQTAWVEAGATLGEVYYWVNEKNENLSLAAGYCPTVCAGGHFGGGGYGPLMRNYGLAADNIIDAHLVNVHGKVLDRKSMGEDLFWALRGGGAESFGIIVAWKIRLVAVPKSTMFSVKKIMEIHELVKLVNKWQNIAYKYDKDLLLMTHFITRNITDNQGKNKTAIHTYFSSVFLGGVDSLVDLMNKSFPELGIKKEDCRQLSWIDTIIFYSGVVNYDTDNFNKEILLDRSAGQNGAFKIKLDYVKKPIPESVFVQILEKLYEEDIGAGMYALYPYGGIMDEISESAIPFPHRAGILYELWYICSWEKQEDNEKHLNWIRNIYNFMTPYVSKNPRLAYLNYRDLDIGINDPKNPNNYTQARIWGEKYFGKNFDRLVKVKTLVDPNNFFRNEQSIPPLPRHRH

SEQ ID NO: 524 - protein, 516 aa, Artificial Sequence
  Synthetic
NPRENFLKCFSQYIPNNATNLKLVYTQNNPLYMSVLNSTIHNLRFTSDTTPKPLVIVTPSHVSHIQATILCSKKVGLQIRTRSGGHDSEGMSYISQVPFVIVDLRNMRSIKIDVHSQTAWVEAGATLGEVYYWVNEKNENLSLAAGYCPTVCAGGHFGGGGYGPLMRNYGLAADNIIDAHLVNVNGKVLDRKSMGEDLFWALRGGGAESFGIIVAWKIRLVAVPKSTMFSVKKIMEIHELVKLVNKWQNIAYKYDKDLLLMTHFITRNITDNQGKNKTAIHTYFSSVFLGGVDSLVDLMNKSFPELGIKKTDCREMSWIDTIIFYSGVVNYDTDNFNKEILLDRSAGQNGAFKIKLDYVKKPIPESVFVQILEKLYEEDIGAGMYVLYPYGGIMDEISESAIPFPHRAGILYELWYICSWEKQEDNEKHLNWIRNIYNFMTPYVSKNPRLAYLNYRDLDIGINDPKNPNNYTQARIWGEKYFGKNFDRLVKVKTLVDPNNFFRNEQSIPPLPRHRH

SEQ ID NO: 525 - protein, 516 aa, Artificial Sequence
  Synthetic
NPRENFLKCFSQYIPNNATNLKLVYTQNNPLYMSVLNSTIHNLRFTSDTTPKPLVIVTPSHVSHIQATILCSKKVGLQIRTRSGGHDAEGMSYISQVPFVIVDLRNMRSIKIDVHSQTAWVEAGATLGEVYYWVNEKNENLSLAAGYCPTVCAGGHFGGGGYGPLMRNYGLAADNIIDAHLVNVNGKVLDRKSMGEDLFWALRGGGAESFGIIVAWKIRLVAVPKSTMFSVKKIMEIHELVKLVNKWQNIAYKYDKDLLLMTHFITRNITDNQGKNKTAIHTYFSSVFLGGVDSLVDLMNKSFPELGIKKTDCREMSWIDTIIFYSGVVNYDTDNFNKEILLDRSAGQNGAFKIKLDYVKKPIPESVFVQILEKLYEEDIGAGMYALYPYGGIMDEISESAIPFPHRAGILYELWYICSWEKQEDNEKHLNWIRNIYNFMTPYVSKNPRLAYLNYRDLDIGINDPKNPNNYTQARIWGEKYFGKNFDRLVKVKTLVDPNNFFRNEQSIPPLPRHRH

SEQ ID NO: 526 - protein, 516 aa, Artificial Sequence
  Synthetic
NPRENFLKCFSQYIPNNATNLNLVYTQNNPLYMSVLNSTIHNLRFTSDTTPKPLVIVTPSHVSHIQATILCSKKVGLQIRTRSGGHDSEGMSYISQVPFVIVDLRNMRSIKIDVHSQTAWVEAGATLGEVYYWVNEKNENLSLAAGYCPTVCAGGHFGGGGYGPLMRNYGLAADNIIDAHLVNVHGKVLDRKSMGEDLFWALRGGGAESFGIIVAWKIRLVAVPKSTMFSVKKIMEIHELVKLVNKWQNIAYKYDKDLLLMTHFITRNITDNQGKNKTAIHTYFSSVFLGGVDSLVDLMNKSFPELGIKKTDCRQLSWIDTIIFYSGVVNYDTDNFNKEILLDRSAGQNGAFKIKLDYVKKPIPESVFVQILEKLYEEDIGAGMYVLYPYGGIMDEISESAIPFPHRAGILYELWYICSWEKQEDNEKHLNWIRNIYNFMTPYVSKNPRLAYLNYRDLDIGINDPKNPNNYTQARIWGEKYFGKNFDRLVKVKTLVDPNNFFRNEQSIPPLPRHRH

SEQ ID NO: 527 - protein, 516 aa, Artificial Sequence
  Synthetic
NPRENFLKCFSQYIPNNATNLKLVYTQNNPLYMSVLNSTIHNLRFTSDTTPKPLVIVTPSHVSHIQATILCSKKVGLQIRTRSGGHDSEGMSYISQVPFVIVDLRNMRSIKIDVHSQTAWVEAGATLGEVYYWVNEKNENLSLAAGYCPTVCAGGHFGGGGYGPLMRNYGLAADNIIDAHLVNVNGKVLDRKSMGEDLFWALRGGGAESFGIIVAWKIRLVAVPKSTMFSVKKIMEIHELVKLVNKWQNIAYKYDKDLLLMTHFITRNITDNQGKNKTAIHTYFSSVFLGGVDSLVDLMNKSFPELGIKKEDCRQMSWIDTIIFYSGVVNYDTDNFNKEILLDRSAGQNGAFKIKLDYVKKPIPESVFVQILEKLYEEDIGAGMYVLYPYGGIMDEISESAIPFPHRAGILYELWYICSWEKQEDNEKHLNWIRNIYNFMTPYVSKNPRLAYLNYRDLDIGINDPKNPNNYTQARIWGEKYFGKNFDRLVKVKTLVDPNNFFRNEQSIPPLPRHRH

SEQ ID NO: 528 - protein, 516 aa, Artificial Sequence
  Synthetic
NPRENFLKCFSQYIPNNATNLNLVYTQNNPLYMSVLNSTIQNLRFTSDTTPKPLVIVTPSHVSHIQATILCSKKVGLQIRTRSGGHDSEGMSYISQVPFVIVDLRNMRSIKIDVHSQTAWVEAGATLGEVYYWVNEKNENLSLAAGYCPTVCAGGHFGGGGYGPLMRNYGLAADNIIDAHLVNVHGKVLDRKSMGEDLFWALRGGGAESFGIIVAWKIRLVAVPKSTMFSVKKIMEIHELVKLVNKWQNIAYKYDKDLLLMTHFITRNITDNQGKNKTAIHTYFSSVFLGGVDSLVDLMNKSFPELGIKKTDCRELSWIDTIIFYSGVVNYDTDNFNKEILLDRSAGQNGAFKIKLDYVKKPIPESVFVQILEKLYEEDIGAGMYVLYPYGGIMDEISESAIPFPHRAGILYELWYICSWEKQEDNEKHLNWIRNIYNFMTPYVSKNPRLAYLNYRDLDIGINDPKNPNNYTQARIWGEKYFGKNFDRLVKVKTLVDPNNFFRNEQSIPPLPRHRH

SEQ ID NO: 529 - protein, 516 aa, Artificial Sequence
  Synthetic
NPRENFLKCFSQYIPNNATNLNLVYTQNNPLYMSVLNSTIQNLRFTSDTTPKPLVIVTPSHVSHIQATILCSKKVGLQIRTRSGGHDSEGMSYISQVPFVIVDLRNMRSIKIDVHSQTAWVEAGATLGEVYYWVNEKNENLSLAAGYCPTVCAGGHFGGGGYGPLMRNYGLAADNIIDAHLVNVNGKVLDRKSMGEDLFWALRGGGAESFGIIVAWKIRLVAVPKSTMFSVKKIMEIHELVKLVNKWQNIAYKYDKDLLLMTHFITRNITDNQGKNKTAIHTYFSSVFLGGVDSLVDLMNKSFPELGIKKEDCRELSWIDTIIFYSGVVNYDTDNFNKEILLDRSAGQNGAFKIKLDYVKKPIPESVFVQILEKLYEEDIGAGMYVLYPYGGIMDEISESAIPFPHRAGILYELWYICSWEKQEDNEKHLNWIRNIYNFMTPYVSKNPRLAYLNYRDLDIGINDPKNPNNYTQARIWGEKYFGKNFDRLVKVKTLVDPNNFFRNEQSIPPLPRHRH

SEQ ID NO: 530 - protein, 516 aa, Artificial Sequence
  Synthetic
NPRENFLKCFSQYIPNNATNLKLVYTQNNPLYMSVLNSTIHNLRFTSDTTPKPLVIVTPSHVSHIQATILCSKKVGLQIRTRSGGHDAEGMSYISQVPFVIVDLRNMRSIKIDVHSQTAWVEAGATLGEVYYWVNEKNENLSLAAGYCPTVCAGGHFGGGGYGPLMRNYGLAADNIIDAHLVNVHGKVLDRKSMGEDLFWALRGGGAESFGIIVAWKIRLVAVPKSTMFSVKKIMEIHELVKLVNKWQNIAYKYDKDLLLMTHFITRNITDNQGKNKTAIHTYFSSVFLGGVDSLVDLMNKSFPELGIKKTDCRELSWIDTIIFYSGVVNYDTDNFNKEILLDRSAGQNGAFKIKLDYVKKPIPESVFVQILEKLYEEDIGAGMYALYPYGGIMDEISESAIPFPHRAGILYELWYICSWEKQEDNEKHLNWIRNIYNFMTPYVSKNPRLAYLNYRDLDIGINDPKNPNNYTQARIWGEKYFGKNFDRLVKVKTLVDPNNFFRNEQSIPPLPRHRH

SEQ ID NO: 531 - protein, 516 aa, Artificial Sequence
  Synthetic
NPRENFLKCFSQYIPNNATNLKLVYTQNNPLYMSVLNSTIHNLRFTSDTTPKPLVIVTPSHVSHIQATILCSKKVGLQIRTRSGGHDAEGMSYISQVPFVIVDLRNMRSIKIDVHSQTAWVEAGATLGEVYYWVNEKNENLSLAAGYCPTVCAGGHFGGGGYGPLMRNYGLAADNIIDAHLVNVNGKVLDRKSMGEDLFWALRGGGAESFGIIVAWKIRLVAVPKSTMFSVKKIMEIHELVKLVNKWQNIAYKYDKDLLLMTHFITRNITDNQGKNKTAIHTYFSSVFLGGVDSLVDLMNKSFPELGIKKEDCRELSWIDTIIFYSGVVNYDTDNFNKEILLDRSAGQNGAFKIKLDYVKKPIPESVFVQILEKLYEEDIGAGMYALYPYGGIMDEISESAIPFPHRAGILYELWYICSWEKQEDNEKHLNWIRNIYNFMTPYVSKNPRLAYLNYRDLDIGINDPKNPNNYTQARIWGEKYFGKNFDRLVKVKTLVDPNNFFRNEQSIPPLPRHRH

SEQ ID NO: 532 - protein, 516 aa, Artificial Sequence
  Synthetic
NPRENFLKCFSQYIPNNATNLKLVYTQNNPLYMSVLNSTIHNLRFTSDTTPKPLVIVTPSHVSHIQATILCSKKVGLQIRTRSGGHDSEGMSYISQVPFVIVDLRNMRSIKIDVHSQTAWVEAGATLGEVYYWVNEKNENLSLAAGYCPTVCAGGHFGGGGYGPLMRNYGLAADNIIDAHLVNVNGKVLDRKSMGEDLFWALRGGGAESFGIIVAWKIRLVAVPKSTMFSVKKIMEIHELVKLVNKWQNIAYKYDKDLLLMTHFITRNITDNQGKNKTAIHTYFSSVFLGGVDSLVDLMNKSFPELGIKKTDCRELSWIDTIIFYSGVVNYDTDNFNKEILLDRSAGQNGAFKIKLDYVKKPIPESVFVQILEKLYEEDIGAGMYVLYPYGGIMDEISESAIPFPHRAGILYELWYICSWEKQEDNEKHLNWIRNIYNFMTPYVSKNPRLAYLNYRDLDIGINDPKNPNNYTQARIWGEKYFGKNFDRLVKVKTLVDPNNFFRNEQSIPPLPRHRH

SEQ ID NO: 533 - protein, 516 aa, Artificial Sequence
  Synthetic
NPRENFLKCFSQYIPNNATNLKLVYTQNNPLYMSVLNSTIHNLRFTSDTTPKPLVIVTPSHVSHIQATILCSKKVGLQIRTRSGGHDSEGMSYISQVPFVIVDLRNMRSIKIDVHSQTAWVEAGATLGEVYYWVNEKNENLSLAAGYCPTVCAGGHFGGGGYGPLMRNYGLAADNIIDAHLVNVHGKVLDRKSMGEDLFWALRGGGAESFGIIVAWKIRLVAVPKSTMFSVKKIMEIHELVKLVNKWQNIAYKYDKDLLLMTHFITRNITDNQGKNKTAIHTYFSSVFLGGVDSLVDLMNKSFPELGIKKTDCRELSWIDTIIFYSGVVNYDTDNFNKEILLDRSAGQNTAFKIKLDYVKKPIPESVFVQILEKLYEEDIGAGMYVLYPYGGIMDEISESAIPFPHRAGILYELWYICSWEKQEDNEKHLNWIRNIYNFMTPYVSKNPRLAYLNYRDLDIGINDPKNPNNYTQARIWGEKYFGKNFDRLVKVKTLVDPNNFFRNEQSIPPLPRHRH

SEQ ID NO: 534 - protein, 516 aa, Artificial Sequence
  Synthetic
NPRENFLKCFSQYIPNNATNLKLVYTQNNPLYMSVLNSTIQNLRFTSDTTPKPLVIVTPSHVSHIQATILCSKKVGLQIRTRSGGHDSEGMSYISQVPFVIVDLRNMRSIKIDVHSQTAWVEAGATLGEVYYWVNEKNENLSLAAGYCPTVCAGGHFGGGGYGPLMRNYGLAADNIIDAHLVNVNGKVLDRKSMGEDLFWALRGGGAESFGIIVAWKIRLVAVPKSTMFSVKKIMEIHELVKLVNKWQNIAYKYDKDLLLMTHFITRNITDNQGKNKTAIHTYFSSVFLGGVDSLVDLMNKSFPELGIKKEDCREMSWIDTIIFYSGVVNYDTDNFNKEILLDRSAGQNGAFKIKLDYVKKPIPESVFVQILEKLYEEDIGAGMYVLYPYGGIMDEISESAIPFPHRAGILYELWYICSWEKQEDNEKHLNWIRNIYNFMTPYVSKNPRLAYLNYRDLDIGINDPKNPNNYTQARIWGEKYFGKNFDRLVKVKTLVDPNNFFRNEQSIPPLPRHRH

SEQ ID NO: 535 - protein, 516 aa, Artificial Sequence
  Synthetic
NPRENFLKCFSQYIPNNATNLNLVYTQNNPLYMSVLNSTIHNLRFTSDTTPKPLVIVTPSHVSHIQATILCSKKVGLQIRTRSGGHDSEGMSYISQVPFVIVDLRNMRSIKIDVHSQTAWVEAGATLGEVYYWVNEKNENLSLAAGYCPTVCAGGHFGGGGYGPLMRNYGLAADNIIDAHLVNVNGKVLDRKSMGEDLFWALRGGGAESFGIIVAWKIRLVAVPKSTMFSVKKIMEIHELVKLVNKWQNIAYKYDKDLLLMTHFITRNITDNQGKNKTAIHTYFSSVFLGGVDSLVDLMNKSFPELGIKKTDCREMSWIDTIIFYSGVVNYDTDNFNKEILLDRSAGQNGAFKIKLDYVKKPIPESVFVQILEKLYEEDIGAGMYVLYPYGGIMDEISESAIPFPHRAGILYELWYICSWEKQEDNEKHLNWIRNIYNFMTPYVSKNPRLAYLNYRDLDIGINDPKNPNNYTQARIWGEKYFGKNFDRLVKVKTLVDPNNFFRNEQSIPPLPRHRH

SEQ ID NO: 536 - protein, 516 aa, Artificial Sequence
  Synthetic
NPRENFLKCFSQYIPNNATNLKLVYTQNNPLYMSVLNSTIQNLRFTSDTTPKPLVIVTPSHVSHIQATILCSKKVGLQIRTRSGGHDSEGMSYISQVPFVIVDLRNMRSIKIDVHSQTAWVEAGATLGEVYYWVNEKNENLSLAAGYCPTVCAGGHFGGGGYGPLMRNYGLAADNIIDAHLVNVNGKVLDRKSMGEDLFWALRGGGAESFGIIVAWKIRLVAVPKSTMFSVKKIMEIHELVKLVNKWQNIAYKYDKDLLLMTHFITRNITDNQGKNKTAIHTYFSSVFLGGVDSLVDLMNKSFPELGIKKTDCRQMSWIDTIIFYSGVVNYDTDNFNKEILLDRSAGQNGAFKIKLDYVKKPIPESVFVQILEKLYEEDIGAGMYVLYPYGGIMDEISESAIPFPHRAGILYELWYICSWEKQEDNEKHLNWIRNIYNFMTPYVSKNPRLAYLNYRDLDIGINDPKNPNNYTQARIWGEKYFGKNFDRLVKVKTLVDPNNFFRNEQSIPPLPRHRH

SEQ ID NO: 537 - protein, 516 aa, Artificial Sequence
  Synthetic
NPRENFLKCFSQYIPNNATNLKLVYTQNNPLYMSVLNSTIHNLRFTSDTTPKPLVIVTPSHVSHIQATILCSKKVGLQIRTRSGGHDAEGMSYISQVPFVIVDLRNMRSIKIDVHSQTAWVEAGATLGEVYYWVNEKNENLSLAAGYCPTVCAGGHFGGGGYGPLMRNYGLAADNIIDAHLVNVHGKVLDRKSMGEDLFWALRGGGAESFGIIVAWKIRLVAVPKSTMFSVKKIMEIHELVKLVNKWQNIAYKYDKDLLLMTHFITRNITDNQGKNKTAIHTYFSSVFLGGVDSLVDLMNKSFPELGIKKEDCRELSWIDTIIFYSGVVNYDTDNFNKEILLDRSAGQNGAFKIKLDYVKKPIPESVFVQILEKLYEEDIGAGMYALYPYGGIMDEISESAIPFPHRAGILYELWYICSWEKQEDNEKHLNWIRNIYNFMTPYVSKNPRLAYLNYRDLDIGINDPKNPNNYTQARIWGEKYFGKNFDRLVKVKTLVDPNNFFRNEQSIPPLPRHRH

SEQ ID NO: 538 - protein, 516 aa, Artificial Sequence
  Synthetic
NPRENFLKCFSQYIPNNATNLKLVYTQNNPLYMSVLNSTIQNLRFTSDTTPKPLVIVTPSHVSHIQATILCSKKVGLQIRTRSGGHDSEGMSYISQVPFVIVDLRNMRSIKIDVHSQTAWVEAGATLGEVYYWVNEKNENLSLAAGYCPTVCAGGHFGGGGYGPLMRNYGLAADNIIDAHLVNVHGKVLDRKSMGEDLFWALRGGGAESFGIIVAWKIRLVAVPKSTMFSVKKIMEIHELVKLVNKWQNIAYKYDKDLLLMTHFITRNITDNQGKNKTAIHTYFSSVFLGGVDSLVDLMNKSFPELGIKKTDCRELSWIDTIIFYSGVVNYDTDNFNKEILLDRSAGQNGAFKIKLDYVKKPIPESVFVQILEKLYEEDIGAGMYVLYPYGGIMDEISESAIPFPHRAGILYELWYICSWEKQEDNEKHLNWIRNIYNFMTPYVSKNPRLAYLNYRDLDIGINDPKNPNNYTQARIWGEKYFGKNFDRLVKVKTLVDPDNFFRNEQSIPPLPRHRH

SEQ ID NO: 539 - protein, 516 aa, Artificial Sequence
  Synthetic
NPRENFLKCFSQYIPNNATNLKLVYTQNNPLYMSVLNSTIQNLRFTSDTTPKPLVIVTPSHVSHIQATILCSKKVGLQIRTRSGGHDSEGMSYISQVPFVIVDLRNMRSIKIDVHSQTAWVEAGATLGEVYYWVNEKNENLSLAAGYCPTVCAGGHFGGGGYGPLMRNYGLAADNIIDAHLVNVNGKVLDRKSMGEDLFWALRGGGAESFGIIVAWKIRLVAVPKSTMFSVKKIMEIHELVKLVNKWQNIAYKYDKDLLLMTHFITRNITDNQGKNKTAIHTYFSSVFLGGVDELVDLMNKSFPELGIKKTDCREMSWIDTIIFYSGVVNYDTDNFNKEILLDRSAGQNGAFKIKLDYVKKPIPESVFVQILEKLYEEDIGAGMYVLYPYGGIMDEISESAIPFPHRAGILYELWYICSWEKQEDNEKHLNWIRNIYNFMTPYVSKNPRLAYLNYRDLDIGINDPKNPNNYTQARIWGEKYFGKNFDRLVKVKTLVDPNNFFRNEQSIPPLPRHRH

SEQ ID NO: 540 - protein, 516 aa, Artificial Sequence
  Synthetic
NPRENFLKCFSQYIPNNATNLKLVYTQNNPLYMSVLNSTIHNLRFTSDTTPKPLVIVTPSHVSHIQATILCSKKVGLQIRTRSGGHDAEGMSYISQVPFVIVDLRNMRSIKIDVHSQTAWVEAGATLGEVYYWVNEKNENLSLAAGYCPTVCAGGHFGGGGYGPLMRNYGLAADNIIDAHLVNVNGKVLDRKSMGEDLFWALRGGGAESFGIIVAWKIRLVAVPKSTMFSVKKIMEIHELVKLVNKWQNIAYKYDKDLLLMTHFITRNITDNQGKNKTAIHTYFSSVFLGGVDSLVDLMNKSFPELGIKKEDCREMSWIDTIIFYSGVVNYDTDNFNKEILLDRSAGQNGAFKIKLDYVKKPIPESVFVQILEKLYEEDIGAGMYALYPYGGIMDEISESAIPFPHRAGILYELWYICSWEKQEDNEKHLNWIRNIYNFMTPYVSKNPRLAYLNYRDLDIGINDPKNPNNYTQARIWGEKYFGKNFDRLVKVKTLVDPNNFFRNEQSIPPLPRHRH

SEQ ID NO: 541 - protein, 516 aa, Artificial Sequence
  Synthetic
NPRENFLKCFSQYIPNNATNLNLVYTQNNPLYMSVLNSTIQNLRFTSDTTPKPLVIVTPSHVSHIQGTILCSKKVGLQIRTRSGGHDSEGMSYISQVPFVIVDLRNMRSIKIDVHSQTAWVEAGATLGEVYYWVNEKNENLSLAAGYCPTVCAGGHFGGGGYGPLMRNYGLAADNIIDAHLVNVNGKVLDRKSMGEDLFWALRGGGAESFGIIVAWKIRLVAVPKSTMFSVKKIMEIHELVKLVNKWQNIAYKYDKDLLLMTHFITRNITDNQGKNKTAIHTYFSSVFLGGVDSLVDLMNKSFPELGIKKEDCRELSWIDTIIFYSGVVNYDTDNFNKEILLDRSAGQNGAFKIKLDYVKKPIPESVFVQILEKLYEEDIGAGMYVLYPYGGIMDEISESAIPFPHRAGILYELWYICSWEKQEDNEKHLNWIRNIYNFMTPYVSKNPRLAYLNYRDLDIGINDPKNPNNYTQARIWGEKYFGKNFDRLVKVKTLVDPNNFFRNEQSIPPLPRHRH

SEQ ID NO: 542 - protein, 516 aa, Artificial Sequence
  Synthetic
NPRENFLKCFSQYIPNNATNLKLVYTQNNPLYMSVLNSTIQNLRFTSDTTPKPLVIVTPSHVSHIQATILCSKKVGLQIRTRSGGHDSEGMSYISQVPFVIVDLRNMRSIKIDVHSQTAWVEAGATLGEVYYWVNEKNENLSLAAGYCPTVCAGGHFGGGGYGPLMRNYGLAADNIIDAHLVNVNGKVLDRKSMGEDLFWALRGGGAESFGIIVAWKIRLVAVPKSTMFSVKKIMEIHELVKLVNKWQNIAYKYDKDLLLMTHFITRNITDNQGKNKTAIHTYFSSVFLGGVDSLVDLMNKSFPELGIKKTDCRELSWIDTIIFYSGVVNYDTDNFNKEILLDRSAGQNGAFKIKLDYVKKPIPESVFVQILEKLYEEDIGAGMYVLYPYGGIMDEISESAIPFPHRAGILYELWYICSWEKQEDNEKHLNWIRNIYNFMTPYVSKNPRLAYLNYRDLDIGINDPKNPNNYTQARIWGEKYFGKNFDRLVKVKTLVDPDNFFRNEQSIPPLPRHRH

SEQ ID NO: 543 - protein, 516 aa, Artificial Sequence
  Synthetic
NPRENFLKCFSQYIPNNATNLNLVYTQNNPLYMSVLNSTIHNLRFTSDTTPKPLVIVTPSHVSHIQATILCSKKVGLQIRTRSGGHDSEGMSYISQVPFVIVDLRNMRSIKIDVHSQTAWVEAGATLGEVYYWVNEKNENLSLAAGYCPTVCAGGHFGGGGYGPLMRNYGLAADNIIDAHLVNVHGKVLDRKSMGEDLFWALRGGGAESFGIIVAWKIRLVAVPKSTMFSVKKIMEIHELVKLVNKWQNIAYKYDKDLLLMTHFITRNITDNQGKNKTAIHTYFSSVFLGGVDSLVDLMNKSFPELGIKKTDCREMSWIDTIIFYSGVVNYDTDNFNKEILLDRSAGQNGAFKIKLDYVKKPIPESVFVQILEKLYEEDIGAGMYVLYPYGGIMDEISESAIPFPHRAGILYELWYICSWEKQEDNEKHLNWIRNIYNFMTPYVSKNPRLAYLNYRDLDIGINDPKNPNNYTQARIWGEKYFGKNFDRLVKVKTLVDPNNFFRNEQSIPPLPRHRH

SEQ ID NO: 544 - protein, 516 aa, Artificial Sequence
  Synthetic
NPRENFLKCFSQYIPNNATNLNLVYTQNNPLYMSVLNSTIHNLRFTSDTTPKPLVIVTPSHVSHIQATILCSKKVGLQIRTRSGGHDSEGMSYISQVPFVIVDLRNMRSIKIDVHSQTAWVEAGATLGEVYYWVNEKNENLSLAAGYCPTVCAGGHFGGGGYGPLMRNYGLAADNIIDAHLVNVNGKVLDRKSMGEDLFWALRGGGAESFGIIVAWKIRLVAVPKSTMFSVKKIMEIHELVKLVNKWQNIAYKYDKDLLLMTHFITRNITDNQGKNKTAIHTYFSSVFLGGVDSLVDLMNKSFPELGIKKEDCREMSWIDTIIFYSGVVNYDTDNFNKEILLDRSAGQNGAFKIKLDYVKKPIPESVFVQILEKLYEEDIGAGMYVLYPYGGIMDEISESAIPFPHRAGILYELWYICSWEKQEDNEKHLNWIRNIYNFMTPYVSKNPRLAYLNYRDLDIGINDPKNPNNYTQARIWGEKYFGKNFDRLVKVKTLVDPNNFFRNEQSIPPLPRHRH

SEQ ID NO: 545 - protein, 516 aa, Artificial Sequence
  Synthetic
NPRENFLKCFSQYIPNNATNLKLVYTQNNPLYMSVLNSTIHNLRFTSDTTPKPLVIVTPSHVSHIQATILCSKKVGLQIRTRSGGHDSEGMSYISQVPFVIVDLRNMRSIKIDVHSQTAWVEAGATLGEVYYWVNEKNENLSLAAGYCPTVCAGGHFGGGGYGPLMRNYGLAADNIIDAHLVNVHGKVLDRKSMGEDLFWALRGGGAESFGIIVAWKIRLVAVPKSTMFSVKKIMEIHELVKLVNKWQNIAYKYDKDLLLMTHFITRNITDNQGKNKTAIHTYFSSVFLGGVDSLVDLMNKSFPELGIKKEDCRELSWIDTIIFYSGVVNYDTDNFNKEILLDRSAGQNGAFKIKLDYVKKPIPESVFVQILEKLYEEDIGAGMYVLYPYGGIMDEISESAIPFPHRAGILYELWYICSWEKQEDNEKHLNWIRNIYNFMTPYVSKNPRLAYLNYRDLDIGINDPKNPNNYTQARIWGEKYFGKNFDRLVKVKTLVDPNNFFRNEQSIPPLPRHRH

SEQ ID NO: 546 - protein, 516 aa, Artificial Sequence
  Synthetic
NPRENFLKCFSQYIPNNATNLNLVYTQNNPLYMSVLNSTIQNLRFTSDTTPKPLVIVTPSHVSHIQATILCSKKVGLQIRTRSGGHDSEGMSYISQVPFVIVDLRNMRSIKIDVHSQTAWVEAGATLGEVYYWVNEKNENLSLAAGYCPTVCAGGHFGGGGYGPLMRNYGLAADNIIDAHLVNVHGKVLDRKSMGEDLFWALRGGGAESFGIIVAWKIRLVAVPKSTMFSVKKIMEIHELVKLVNKWQNIAYKYDKDLLLMTHFITRNITDNQGKNKTAIHTYFSSVFLGGVDSLVDLMNKSFPELGIKKEDCREMSWIDTIIFYSGVVNYDTDNFNKEILLDRSAGQNGAFKIKLDYVKKPIPESVFVQILEKLYEEDIGAGMYVLYPYGGIMDEISESAIPFPHRAGILYELWYICSWEKQEDNEKHLNWIRNIYNFMTPYVSKNPRLAYLNYRDLDIGINDPKNPNNYTQARIWGEKYFGKNFDRLVKVKTLVDPNNFFRNEQSIPPLPRHRH

SEQ ID NO: 547 - protein, 516 aa, Artificial Sequence
  Synthetic
NPRENFLKCFSQYIPNNATNLKLVYTQNNPLYMSVLNSTIHNLRFTSDTTPKPLVIVTPSHVSHIQATILCSKKVGLQIRTRSGGHDSEGMSYISQVPFVIVDLRNMRSIKIDVHSQTAWVEAGATLGEVYYWVNEKNENLSLAAGYCPTVCAGGHFGGGGYGPLMRNYGLAADNIIDAHLVNVHGKVLDRKSMGEDLFWALRGGGAESFGIIVAWKIRLVAVPKSTMFSVKKIMEIHELVKLVNKWQNIAYKYDKDLLLMTHFITRNITDNQGKNKTAIHTYFSSVFLGGVDSLVDLMNKSFPELGIKKTDCRQLSWIDTIIFYSGVVNYDTDNFNKEILLDRSAGQNGAFKIKLDYVKKPIPESVFVQILEKLYEEDIGAGMYVLYPYGGIMDEISESAIPFPHRAGILYELWYICSWEKQEDNEKHLNWIRNIYNFMTPYVSKNPRLAYLNYRDLDIGINDPKNPNNYTQARIWGEKYFGKNFDRLVKVKTLVDPDNFFRNEQSIPPLPRHRH

SEQ ID NO: 548 - protein, 516 aa, Artificial Sequence
  Synthetic
NPRENFLKCFSQYIPNNATNLNLVYTQNNPLYMSVLNSTIHNLRFTSDTTPKPLVIVTPSHVSHIQGTILCSKKVGLQIRTRSGGHDSEGMSYISQVPFVIVDLRNMRSIKIDVHSQTAWVEAGATLGEVYYWVNEKNENLSLAAGYCPTVCAGGHFGGGGYGPLMRNYGLAADNIIDAHLVNVNGKVLDRKSMGEDLFWALRGGGAESFGIIVAWKIRLVAVPKSTMFSVKKIMEIHELVKLVNKWQNIAYKYDKDLLLMTHFITRNITDNQGKNKTAIHTYFSSVFLGGVDSLVDLMNKSFPELGIKKTDCREMSWIDTIIFYSGVVNYDTDNFNKEILLDRSAGQNGAFKIKLDYVKKPIPESVFVQILEKLYEEDIGAGMYVLYPYGGIMDEISESAIPFPHRAGILYELWYICSWEKQEDNEKHLNWIRNIYNFMTPYVSKNPRLAYLNYRDLDIGINDPKNPNNYTQARIWGEKYFGKNFDRLVKVKTLVDPNNFFRNEQSIPPLPRHRH

SEQ ID NO: 549 - protein, 517 aa, Artificial Sequence
  Synthetic
NPRENFLKCFSKHIPNNVANPKLVYTQHDQLYMSILNSTIQNLRFTSDTTPKPLVIVTPSNVSHIQATILCSKKVGLQIRTRSGGHDAEGMSYISQVPFVVVDLRNMHSIKIDVHSQTAWVEAGATLGEVYYWINEKNENLSFPGGYCPTVGVGGHFSGGGYGALMRNYGLAADNIIDAHLVNVDGKVLDRKSMGEDLFWAIRGGGGENFGIIAAWKIKLVPVPSKVTIFSVKKNMEIHGLVKLFNKWQNIAYKYDKDLVLMTHFITKNITDNHGKNKTTVHGYFSSIFHGGVDSLVDLMNKSFPELGIKKTDCKEFSWIDTTIFYSGVVNFNTANFKKEILLDRSAGKKTAFSIKLDYVKKPIPETAMVKILEKLYEEDVGAGMYVLYPYGGIMDEISESAIPFPHRAGIMYELWYTASWEKQEDNEKHINWVRSVYNFTTPYVSQNPRLAYLNYRDLDLGKNNEESPNNYTQARIWGEKYFGKNFNRLVKVKTKVDPNNFFRNEQSIPPLPPHHH

SEQ ID NO: 550 - protein, 516 aa, Artificial Sequence
  Synthetic
NPRENFLKCFSQYIPNNATNLKLVYTQNNPLYMSVLNSTIHNLRFTSDTTPKPLVIVTPSHVSHIQATILCSKKVGLQIRTRSGGHDSEGMSYISQVPFVIVDLRNMRSIKIDVHSQTAWVEAGATLGEVYYWVNEKNENLSLAAGYCPTVCAGGHFGGGGYGPLMRNYGLAADNIIDAHLVNVNGKVLDRKSMGEDLFWALRGGGAESFGIIVAWKIRLVAVPKSTMFSVKKIMEIHELVKLVNKWQNIAYKYDKDLLLMTHFITRNITDNQGKNKTAIHTYFSSVFLGGVDSLVDLMNKSFPELGIKKEDCREMSWIDTIIFYSGVVNYDTDNFNKEILLDRSAGQNGAFKIKLDYVKKPIPESVFVQILEKLYEEDIGAGMYVLYPYGGIMDEISESAIPFPHRAGILYELWYICSWEKQEDNEKHLNWIRNIYNFMTPYVSKNPRLAYLNYRDLDIGINDPKNPNNYTQARIWGEKYFGKNFDRLVKVKTLVDPNNFFRNEQSIPPLPRHRH

SEQ ID NO: 551 - protein, 516 aa, Artificial Sequence
  Synthetic
NPRENFLKCFSQYIPNNATNLKLVYTQNNPLYMSVLNSTIHNLRFTSDTTPKPLVIVTPSHVSHIQATILCSKKVGLQIRTRSGGHDSEGMSYISQVPFVIVDLRNMRSIKIDVHSQTAWVEAGATLGEVYYWVNEKNENLSLAAGYCPTVCAGGHFGGGGYGPLMRNYGLAADNIIDAHLVNVHGKVLDRKSMGEDLFWALRGGGAESFGIIVAWKIRLVAVPKSTMFSVKKIMEIHELVKLVNKWQNIAYKYDKDLLLMTHFITRNITDNQGKNKTAIHTYFSSVFLGGVDSLVDLMNKSFPELGIKKTDCREMSWIDTIIFYSGVVNYDTDNFNKEILLDRSAGQNGAFKIKLDYVKKPIPESVFVQILEKLYEEDIGAGMYVLYPYGGIMDEISESAIPFPHRAGILYELWYICSWEKQEDNEKHLNWIRNIYNFMTPYVSKNPRLAYLNYRDLDIGINDPKNPNNYTQARIWGEKYFGKNFDRLVKVKTLVDPNNFFRNEQSIPPLPRHRH

SEQ ID NO: 552 - protein, 516 aa, Artificial Sequence
  Synthetic
NPRENFLKCFSQYIPNNATNLKLVYTQNNPLYMSVLNSTIHNLRFTSDTTPKPLVIVTPSHVSHIQATILCSKKVGLQIRTRSGGHDSEGMSYISQVPFVIVDLRNMRSIKIDVHSQTAWVEAGATLGEVYYWVNEKNENLSLAAGYCPTVCAGGHFGGGGYGPLMRNYGLAADNIIDAHLVNVNGKVLDRKSMGEDLFWALRGGGAESFGIIVAWKIRLVAVPKSTMFSVKKIMEIHELVKLVNKWQNIAYKYDKDLLLMTHFITRNITDNQGKNKTAIHTYFSSVFLGGVDSLVDLMNKSFPELGIKKEDCRELSWIDTIIFYSGVVNYDTDNFNKEILLDRSAGQNGAFKIKLDYVKKPIPESVFVQILEKLYEEDIGAGMYVLYPYGGIMDEISESAIPFPHRAGILYELWYICSWEKQEDNEKHLNWIRNIYNFMTPYVSKNPRLAYLNYRDLDIGINDPKNPNNYTQARIWGEKYFGKNFDRLVKVKTLVDPNNFFRNEQSIPPLPRHRH

SEQ ID NO: 553 - protein, 517 aa, Artificial Sequence
  Synthetic
NPRENFLKCFSKHIPNNVANPKLVYTQHDQLYSSILNSTIQNLRFTSDTTPKPLVIVTPSNVSHIQATILCSKKVGLQIRTRSGGHDAEGMSYISQVPFVVVDLRNMHSIKIDVHSQTAWVEAGATLGEVYYWINEKNENLSFPGGYCPTVGVGGHFSGGGYGALMRNYGLAADNIIDAHLVNVDGKVLDRKSMGEDLFWAIRGGGGENFGIIAAWKIKLVPVPSKVTIFSVKKNMEIHGLVKLFNKWQNIAYKYDKDLVLMTHFITKNITDNHGKNKTTVHGYFSSIFHGGVDSLVDLMNKSFPELGIKKTDCKEFSWIDTTIFYSGVVNFNTANFKKEILLDRSAGKKTAFSIKLDYVKKPIPETAMVKILEKLYEEDVGAGMYVLYPYGGIMDEISESAIPFPHRAGIMYELWYTASWEKQEDNEKHINWVRSVYNFTTPYVSQNPRLAYLNYRDLDLGKNNEASPNNYTQARIWGEKYFGKNFNRLVKVKTKVDPNNFFRNEQSIPPLPPHHH

SEQ ID NO: 554 - protein, 517 aa, Artificial Sequence
  Synthetic
NPQENFLKCFSQYIPNNVANPKLVYTQHDQLYMSILNSTIQNLRFTSDTTPKPLVIVTPSNVSHIQATILCSKKVGLQIRTRSGGHDAEGMSYISQVPFVIVDLRNMHSIKIDVHSQTAWVEAGATLGEVYYWINEKNENLSFPGGYCPTVGVGGHFSGGGYGALMRNYGLAADNIIDAHLVNVDGKVLDRKSMGEDLFWAIRGGGGENFGIIAAWKIKLVAVPSKSTIFSVKKNMEIHGLVKLFNKWQNIAYKYDKDLLLMTHFITRNITDNHGKNKTTVHGYFSSIFHGGVDSLVDLMNKSFPELGIKKTDCKELSWIDTTIFYSGVVNYNTANFKKEILLDRSAGKKTAFSIKLDYVKKPIPETAMVKILEKLYEEDVGVGMYVLYPFGGIMDEISESAIPFPHRAGIMYELWYTASWEKQEDNEKHINWVRSVYNFTTPYVSQNPRLAYLNYRDLDLGKTNPESPNNYTQARIWGEKYFGKNFNRLVKVKTKVDPNNFFRNEQSIPPLPPHHH

SEQ ID NO: 555 - protein, 517 aa, Artificial Sequence
  Synthetic
NPQENFLKCFSKHIPNNVANPKLVYTQHDQLYMSILNSTIQNLRFTSDTTPKPLVIVTPSNVSHIQATILCSKKVGLQIRTRSGGHDAEGMSYISQVPFVVVDLRNMHSIKIDVHSQTAWVEAGATLGEVYYWINEKNENLSFPGGYCPTVGVGGHFSGGGYGALMRNYGLAADNIIDAHLVNVDGKVLDRKSMGEDLFWAIRGGGGENFGIIAAWKIKLVDVPSKVTIFSVKKNMEIHGLVKLFNKWQNIAYKYDKDLVLMTHFITKNITDNHGKNKTTVHGYFSSIFHGGVDSLVDLMNKSFPELGIKKTDCKEFSWIDTTIFYSGVVNFNTANFKKEILLDRSAGKKTAFSIKLDYVKKPIPETAMVKILEKLYEEDVGAGMYVLYPYGGIMEEISESAIPFPHRAGIMYELWYTASWEKQEDNEKHINWVRSVYNFTTPYVSQNPRLAYLNYRDLDLGKNNEASPNNYTQARIWGEKYFGKNFNRLVKVKTKVDPNNFFRNEQSIPPLPPHHH

SEQ ID NO: 556 - protein, 517 aa, Artificial Sequence
  Synthetic
NPRENFLKCFSKHIPNNVANPKLVYTQHDQLYMSILNSTIQNLRFTSDTTPKPLVIVTPSNVSHIQATILCSKKVGLQIRTRSGGHDAEGMSYISQVPFVVVDLRNMHSIKIDVHSQTAWVEAGATLGEVYYWINEKNENLSFPGGYCPTVGVGGHFSGGGYGALMRNYGLAADNIIDAHLVNVDGKVLDRKSMGEDLFWAIRGGGGENFGIIAAWKIKLVPVPSKSTIFSVKKNMEIHGLVKLFNKWQNIAYKYDKDLVLMTHFITKNITDNHGKNKTTVHGYFSSIFHGGVDSLVDLMNKSFPELGIKKTDCKEFSWIDTTIFYSGVVNFNTANFKKEILLDRSAGKKTAFSIKLDYVKKPIPETAMVKILEKLYEEDVGAGMYVLYPYGGIMEEISESAIPFPHRAGIMYELWYTASWEKQEDNEKHINWVRSVYNFTTPYVSQNPRLAYLNYRDLDLGKTNEASPNNYTQARIWGEKYFGKNFNRLVKVKTKVDPNNFFRNEQSIPPLPPHHH

SEQ ID NO: 557 - protein, 517 aa, Artificial Sequence
  Synthetic
NPQENFLKCFSQYIPTNVTNAKLVYTQHDQFYSSILNSTIQNLRFTSDTTPKPLVIITPLNVSHIQGTILCSKKVGLQIRTRSGGHDAEGMSYISQVPFVVVDLRNMHSIKIDVESQTAWVEAGATLGEVYYWINEKNENLSFPGGYCPTVGVGGHFSGGGYGALMRNYGLAADNIIDAHLVNVDGKVLDRKSMGEDLFWAIRGGGGENFGIIAAWKIKLVAVPSKVTIFSVKKNMEIHGLVKLFNKWQNIAYKYDKDLVLMTHFITKNITDNHGKNKTTVHGYFSSIFHGGVDSLVDLMNKSFPELGIKKTDCKEFSWIDTTIFYSGVVNFNTANFKKEILLDRSAGKKTAFSIKLDYVKKPIPETAMVKILEKLYEEDVGAGMYVLYPYGGIMDEISESAIPFPHRAGIMYELWYTASWEKQEDNEKHINWVRSVYNFTTPYVSQNPRLAYLNYRDLDLGKNNEASPNNYTQARIWGEKYFGKNFNRLVKVKTKVDPNNFFRNEQSIPPLPLRHH

SEQ ID NO: 558 - protein, 517 aa, Artificial Sequence
  Synthetic
NPQENFLKCFSQYIPNNPANPKLVYTQHDQLYMSILNSTIQNLRFTSDTTPKPLVIVTPSNVSHIQATILCSKKVGLQIRTRSGGHDAEGMSYISQVPFVIVDLRNMHSIKIDVHSQTAWVEAGATLGEVYYWINEKNENLSFPGGYCPTVGVGGHFSGGGYGALMRNYGLAADNIIDAHLVNVDGKVLDRKSMGEDLFWAIRGGGGENFGIIAAWKIKLVAVPSKSTIFSVKKNMEIHGLVKLFNKWQNIAYKYDKDLLLMTHFITRNITDNHGKNKTTVHGYFSSIFHGGVDSLVDLMNKSFPELGIKKEDCKELSWIDTTIFYSGVVNYNTANFKKEILLDRSAGKKTAFSIKLDYVKKPIPETAMVKILEKLYEEDVGVGMYVLYPYGGIMDEISESAIPFPHRAGIMYELWYTASWEKQEDNEKHINWVRSVYNFTTPYVSQNPRLAYLNYRDLDLGKTNPESPNNYTQARIWGEKYFGKNFNRLVKVKTKVDPNNFFRNEQSIPPLPPHHH

SEQ ID NO: 559 - protein, 517 aa, Artificial Sequence
  Synthetic
NPRENFLKCFSKHIPNNVANPKLVYTQHDQLYSSILNSTIQNLRFTSDTTPKPLVIVTPSNVSHIQATILCSKKVGLQIRTRSGGHDAEGMSYISQVPFVVVDLRNMHSIKIDVHSQTAWVEAGATLGEVYYWINEKNENLSFPGGYCPTVGVGGHFSGGGYGALMRNYGLAADNIIDAHLVNVDGKVLDRKSMGEDLFWAIRGGGGENFGIIAAWKIKLVDVPSKVTIFSVKKNMEIHGLVKLFNKWQNIAYKYDKDLVLMTHFITKNITDNHGKNKTTVHGYFSSIFHGGVDSLVDLMNKSFPELGIKKTDCKEFSWIDTTIFYSGVVNFNTANFKKEILLDRSAGKKTAFSIKLDYVKKPIPETAMVKILEKLYEEDVGAGMYVLYPYGGIMEEISESAIPFPHRAGIMYELWYTASWEKQEDNEKHINWVRSVYNFTTPYVSKNPRLAYLNYRDLDLGKNNEESPNNYTQARIWGEKYFGKNFNRLVKVKTKVDPNNFFRNEQSIPPLPPHHH

SEQ ID NO: 560 - protein, 517 aa, Artificial Sequence
  Synthetic
NPQENFLKCFSKHIPNNVANPKLVYTQNDQLYMSILNSTIQNLRFTSDTTPKPLVIVTPSNVSHIQATILCSKKVGLQIRTRSGGHDAEGMSYISQVPFVVVDLRNMHSIKIDVHSQTAWVEAGATLGEVYYWINEKNENLSFPGGYCPTVGVGGHFSGGGYGALMRNYGLAADNIIDAHLVNVDGKVLDRKSMGEDLFWAIRGGGGENFGIIAAWKIKLVPVPSKVTIFSVKKNMEIHGLVKLFNKWQNIAYKYDKDLVLMTHFITKNITDNHGKNKTTVHGYFSSIFHGGVDSLVDLMNKSFPELGIKKTDCKEFSWIDTTIFYSGVVNFNTANFKKEILLDRSAGKKTAFSIKLDYVKKPIPETAMVKILEKLYEEDVGAGMYVLYPYGGIMEEISESAIPFPHRAGIMYELWYTASWEKQEDNEKHINWVRSVYNFTTPYVSKNPRLAYLNYRDLDLGKNNEESPNNYTQARIWGEKYFGKNFNRLVKVKTKVDPNNFFRNEQSIPPLPPHHH

SEQ ID NO: 561 - protein, 517 aa, Artificial Sequence
  Synthetic
NPQENFLKCFSQYIPNNPANPKLIYTQNDSLYSSILNSTIQNLRFTSDTTPKPLVIVTPSNVSHIQATILCSKKVGLQIRTRSGGHDAEGMSYISQVPFVIVDLRNMHSIKIDVHSQTAWVEAGATLGEVYYWINEKNENLSFPGGYCPTVGVGGHFSGGGYGALMRNYGLAADNIIDAHLVNVDGKVLDRKSMGEDLFWAIRGGGGENFGIIAAWKIKLVAVPSKVTIFSVKKNMEIHGLVKLFNKWQNIAYKYDKDLLLMTHFITRNITDNHGKNKTTVHGYFSSIFHGGVDSLVDLMNKSFPELGIKKTDCKELSWIDTTIFYSGVVNYNTANFKKEILLDRSAGKKTAFSIKLDYVKKPIPETAMVKILEKLYEEDVGVGMYVLYPYGGIMDEISESAIPFPHRAGIMYELWYTASWEKQEDNEKHINWVRSVYNFTTPYVSKNPRLAYLNYRDLDLGKNNPESPNNYTQARIWGEKYFGKNFNRLVKVKTKVDPNNFFRNEQSIPPLPPHHH

SEQ ID NO: 562 - protein, 517 aa, Artificial Sequence
  Synthetic
NPQENFLKCFSQYIPTNVTNAKLVYTQHDQFYSSILNSTIQNLRFTSDTTPKPLVIITPLNVSHIQGTILCSKKVGLQIRTRSGGHDAEGMSYISQVPFVVVDLRNMHSIKIDVHSQTAWVEAGATLGEVYYWINEKNENLSFPGGYCPTVGVGGHFSGGGYGALMRNYGLAADNIIDAHLVNVDGKVLDRKSMGEDLFWAIRGGGGENFGIIAAWKIKLVAVPSKVTIFSVKKNMEIHGLVKLFNKWQNIAYKYDKDLVLMTHFITKNITDNHGKNKTTVHGYFSSIFHGGVDSLVDLMNKSFPELGIKKEDCKEFSWIDTTIFYSGVVNFNTANFKKEILLDRSAGKKTAFSIKLDYVKKPIPETAMVKILEKLYEEDVGAGMYVLYPYGGIMEEISESAIPFPHRAGIMYELWYTASWEKQEDNEKHINWVRSVYNFTTPYVSQNPRLAYLNYRDLDLGKNNEESPNNYTQARIWGEKYFGKNFNRLVKVKTKVDPNNFFRNEQSIPPLPLRHH

SEQ ID NO: 563 - protein, 517 aa, Artificial Sequence
  Synthetic
NPRENFLKCFSKHIPNNVANPKLVYTQHDQLYSSILNSTIQNLRFISDTTPKPLVIVTPSNVSHIQATILCSKKVGLQIRTRSGGHDAEGMSYISQVPFVVVDLRNMHSIKIDVHSQTAWVEAGATLGEVYYWINEKNENLSFPGGYCPTVGVGGHFSGGGYGALMRNYGLAADNIIDAHLVNVDGKVLDRKSMGEDLFWAIRGGGGENFGIIAAWKIKLVDVPSKVTIFSVKKNMEIHGLVKLFNKWQNIAYKYDKDLVLMTHFITKNITDNHGKNKTTVHGYFSSIFHGGVDSLVDLMNKSFPELGIKKTDCKEFSWIDTTIFYSGVVNFNTANFKKEILLDRSAGKKTAFSIKLDYVKKPIPETAMVKILEKLYEEDVGAGMYVLYPYGGIMEEISESAIPFPHRAGIMYELWYTASWEKQEDNEKHINWVRSVYNFTTPYVSKNPRLAYLNYRDLDLGKNNHESPNNYTQARIWGEKYFGKNFNRLVKVKTKVDPNNFFRNEQSIPPLPPHHH

SEQ ID NO: 564 - protein, 517 aa, Artificial Sequence
  Synthetic
NPRENFLKCFSKHIPNNVANPKLVYTQHDQLYMSILNSTIQNLRFTSDTTPKPLVIVTPSNVSHIQATILCSKKVGLQIRTRSGGHDAEGMSYISQVPFVVVDLRNMHSIKIDVHSQTAWVEAGATLGEVYYWINEKNENLSFPGGYCPTVGVGGHFSGGGYGALMRNYGLAADNIIDAHLVNVDGKVLDRKSMGEDLFWAIRGGGGENFGIIAAWKIKLVDVPSKVTIFSVKKNMEIHGLVKLFNKWQNIAYKYDKDLVLMTHFITKNITDNHGKNKTTVHGYFSSIFHGGVDSLVDLMNKSFPELGIKKTDCKEFSWIDTTIFYSGVVNFNTANFKKEILLDRSAGKKTAFSIKLDYVKKPIPETAMVKILEKLYEEDVGAGMYVLYPYGGIMDEISESAIPFPHRAGIMYELWYTASWEKQEDNEKHINWVRSVYNFTTPYVSQNPRLAYLNYRDLDLGKNNHESPNNYTQARIWGEKYFGKNFNRLVKVKTKVDPNNFFRNEQSIPPLPPHHH

SEQ ID NO: 565 - protein, 517 aa, Artificial Sequence
  Synthetic
NPQENFLKCFSQYIPNNVANPKLVYTQHDQLYMSILNSTIQNLRFTSDTTPKPLVIVTPSNVSHIQATILCAKKVGLQIRTRSGGHDAEGMSYISQVPFVIVDLRNMHSIKIDVESQTAWVEAGATLGEVYYWINEKNENLSFPGGYCPTVGVGGHFSGGGYGALMRNYGLAADNIIDAHLVNVDGKVLDRKSMGEDLFWAIRGGGGENFGIIAAWKIKLVAVPSKSTIFSVKKNMEIHGLVKLFNKWQNIAYKYDKDLLLMTHFITRNITDNHGKNKTTVHGYFSSIFHGGVDSLVDLMNKSFPELGIKKTDCKELSWIDTIIFYSGVVNYNTANFKKEILLDRSAGKKTAFSIKLDYVKKPIPETAMVKILEKLYEEDVGVGMYVLYPYGGIMDEISESAIPFPHRAGIMYELWYTASWEKQEDNEKHINWVRSVYNFTTPYVSQNPRLAYLNYRDLDLGKNNPESPNNYTQARIWGEKYFGKNFNRLVKVKTKVDPNNFFRNEQSIPPLPPHHH

SEQ ID NO: 566 - protein, 517 aa, Artificial Sequence
  Synthetic
NPQENFLKCFSQYIPNNPANPKLVYTQNDSLYSSILNSTIQNLRFTSDTTPKPLVIVTPSNVSHIQATILCSKKVGLQIRTRSGGHDAEGMSYISQVPFVIVDLRNMHSIKIDVHSQTAWVEAGATLGEVYYWINEKNENLSFPGGYCPTVGVGGHFSGGGYGALMRNYGLAADNIIDAHLVNVDGKVLDRKSMGEDLFWAIRGGGGENFGIIAAWKIKLVAVPSKVTIFSVKKNMEIHGLVKLFNKWQNIAYKYDKDLLLMTHFITRNITDNHGKNKTTVHGYFSSIFHGGVDSLVDLMNKSFPELGIKKTDCKELSWIDTTIFYSGVVNYNTANFKKEILLDRSAGKKTAFSIKLDYVKKPIPETAMVKILEKLYEEDVGVGMYVLYPYGGIMDEISESAIPFPHRAGIMYELWYTASWEKQEDNEKHINWVRSVYNFTTPYVSQNPRLAYLNYRDLDLGKNNPESPNNYTQARIWGEKYFGKNFNRLVKVKTKVDPNNFFRNEQSIPPLPPHHH

SEQ ID NO: 567 - protein, 517 aa, Artificial Sequence
  Synthetic
NPQENFLKCFSQYIPNNVANPKLIYTQHDQLYSSILNSTIQNLRFTSDTTPKPLVIVTPSNVSHIQATILCSKKVGLQIRTRSGGHDAEGMSYISQVPFVIVDLRNMHSIKIDVHSQTAWVEAGATLGEVYYWINEKNENLSFPGGYCPTVGVGGHFSGGGYGALMRNYGLAADNIIDAHLVNVDGKVLDRKSMGEDLFWAIRGGGGENFGIIAAWKIKLVAVPSKVTIFSVKKNMEIHGLVKLFNKWQNIAYKYDKDLLLMTHFITRNITDNHGKNKTTVHGYFSSIFHGGVDSLVDLMNKSFPELGIKKEDCKELSWIDTTIFYSGVVNYNTANFKKEILLDRSAGKKTAFSIKLDYVKKPIPETAMVKILEKLYEEDVGVGMYVLYPYGGIMDEISESAIPFPHRAGIMYELWYTASWEKQEDNEKHINWVRSVYNFTTPYVSKNPRLAYLNYRDLDLGKNNPESPNNYTQARIWGEKYFGKNFNRLVKVKTKVDPNNFFRNEQSIPPLPPHHH

SEQ ID NO: 568 - protein, 517 aa, Artificial Sequence
  Synthetic
NPQENFLKCFSQYIPNNPANPKLIYTQNDQLYSSILNSTIQNLRFTSDTTPKPLVIVTPSNVSHIQATILCSKKVGLQIRTRSGGHDAEGMSYISQVPFVIVDLRNMHSIKIDVHSQTAWVEAGATLGEVYYWINEKNENLSFPGGYCPTVGVGGHFSGGGYGALMRNYGLAADNIIDAHLVNVDGKVLDRKSMGEDLFWAIRGGGGENFGIIAAWKIKLVAVPSKVTIFSVKKNMEIHGLVKLFNKWQNIAYKYDKDLLLMTHFITRNITDNHGKNKTTVHGYFSSIFHGGVDSLVDLMNKSFPELGIKKEDCKELSWIDTTIFYSGVVNYNTANFKKEILLDRSAGKKTAFSIKLDYVKKPIPETAMVKILEKLYEEDVGVGMYVLYPYGGIMDEISESAIPFPHRAGIMYELWYTASWEKQEDNEKHINWVRSVYNFTTPYVSKNPRLAYLNYRDLDLGKNNPESPNNYTQARIWGEKYFGKNFNRLVKVKTKVDPNNFFRNEQSIPPLPPHHH

SEQ ID NO: 569 - protein, 517 aa, Artificial Sequence
  Synthetic
NPQENFLKCFSQYIPNNVANPKLVYTQHDSLYMSILNSTIQNLRFTSDTTPKPLVIVTPSNVSHIQATILCSKKVGLQIRTRSGGHDAEGMSYISQVPFVIVDLRNMHSIKIDVESQTAWVEAGATLGEVYYWINEKNENLSFPGGYCPTVGVGGHFSGGGYGALMRNYGLAADNIIDAHLVNVDGKVLDRKSMGEDLFWAIRGGGGENFGIIAAWKIKLVAVPSKVTIFSVKKNMEIHGLVKLFNKWQNIAYKYDKDLLLMTHFITRNITDNHGKNKTTVHGYFSSIFHGGVDSLVDLMNKSFPELGIKKTDCKELSWIDTTIFYSGVVNYNTANFKKEILLDRSAGKKTAFSIKLDYVKKPIPETAMVKILEKLYEEDVGVGMYVLYPYGGIMDEISESAIPFPHRAGIMYELWYTASWEKQEDNEKHINWVRSVYNFTTPYVSQNPRLAYLNYRDLDLGKNNPESPNNYTQARIWGEKYFGKNFNRLVKVKTKVDPNNFFRNEQSIPPLPPHHH

SEQ ID NO: 570 - protein, 517 aa, Artificial Sequence
  Synthetic
NPRENFLKCFSKHIPNNPANPKLVYTQHDQLYSSILNSTIQNLRFTSDTTPKPLVIVTPSNVSHIQATILCSKKVGLQIRTRSGGHDAEGMSYISQVPFVVVDLRNMHSIKIDVHSQTAWVEAGATLGEVYYWINEKNENLSFPGGYCPTVGVGGHFSGGGYGALMRNYGLAADNIIDAHLVNVDGKVLDRKSMGEDLFWAIRGGGGENFGIIAAWKIKLVDVPSKVTIFSVKKNMEIHGLVKLFNKWQNIAYKYDKDLVLMTHFITKNITDNHGKNKTTVHGYFSSIFHGGVDSLVDLMNKSFPELGIKKTDCKEFSWIDTTIFYSGVVNFNTANFKKEILLDRSAGKKTAFSIKLDYVKKPIPETAMVKILEKLYEEDVGAGMYVLYPYGGIMDEISESAIPFPHRAGIMYELWYTASWEKQEDNEKHINWVRSVYNFTTPYVSKNPRLAYLNYRDLDLGKNNEESPNNYTQARIWGEKYFGKNFNRLVKVKTKVDPNNFFRNEQSIPPLPPHHH

SEQ ID NO: 571 - protein, 517 aa, Artificial Sequence
  Synthetic
NPRENFLKCFSKHIPNNPANPKLVYTQHDQLYSSILNSTIQNLRFTSDTTPKPLVIVTPSNVSHIQATILCSKKVGLQIRTRSGGHDAEGMSYISQVPFVVVDLRNMHSIKIDVHSQTAWVEAGATLGEVYYWINEKNENLSFPGGYCPTVGVGGHFSGGGYGALMRNYGLAADNIIDAHLVNVDGKVLDRKSMGEDLFWAIRGGGGENFGIIAAWKIKLVPVPSKVTIFSVKKNMEIHGLVKLFNKWQNIAYKYDKDLVLMTHFITKNITDNHGKNKTTVHGYFSSIFHGGVDSLVDLMNKSFPELGIKKTDCKEFSWIDTTIFYSGVVNFNTANFKKEILLDRSAGKKTAFSIKLDYVKKPIPETAMVKILEKLYEEDVGAGMYVLYPYGGIMEEISESAIPFPHRAGIMYELWYTASWEKQEDNEKHINWVRSVYNFTTPYVSQNPRLAYLNYRDLDLGKNNEASPNNYTQARIWGEKYFGKNFNRLVKVKTKVDPNNFFRNEQSIPPLPPHHH

SEQ ID NO: 572 - protein, 517 aa, Artificial Sequence
  Synthetic
NPQENFLKCFSQYIPNNVANPKLVYTQHDQLYMSILNSTIQNLRFTSDTTPKPLVIVTPSNVSHIQATILCSKKVGLQIRTRSGGHDAEGMSYISQVPFVIVDLRNMHSIKIDVHSQTAWVEAGATLGEVYYWINEKNENLSFPGGYCPTVGVGGHFSGGGYGALMRNYGLAADNIIDAHLVNVDGKVLDRKSMGEDLFWAIRGGGGENFGIIAAWKIKLVAVPSKVTIFSVKKNMEIHGLVKLFNKWQNIAYKYDKDLLLMTHFITRNITDNHGKNKTTVHGYFSSIFHGGVDSLVDLMNKSFPELGIKKTDCKELSWIDTIIFYSGVVNYNTANFKKEILLDRSAGKKTAFSIKLDYVKKPIPETAMVKILEKLYEEDVGVGMYVLYPYGGIMDEISESAIPFPHRAGIMYELWYTASWEKQEDNEKHINWVRSVYNFTTPYVSQNPRLAYLNYRDLDLGKTNPESPNNYTQARIWGEKYFGKNFNRLVKVKTKVDPNNFFRNEQSIPPLPPHHH

SEQ ID NO: 573 - protein, 517 aa, Artificial Sequence
  Synthetic
NPQENFLKCFSQYIPNNPANPKLVYTQHDSLYMSILNSTIQNLRFTSDTTPKPLVIVTPSNVSHIQATILCSKKVGLQIRTRSGGHDAEGMSYISQVPFVIVDLRNMHSIKIDVHSQTAWVEAGATLGEVYYWINEKNENLSFPGGYCPTVGVGGHFSGGGYGALMRNYGLAADNIIDAHLVNVDGKVLDRKSMGEDLFWAIRGGGGENFGIIAAWKIKLVAVPSKVTIFSVKKNMEIHGLVKLFNKWQNIAYKYDKDLLLMTHFITRNITDNHGKNKTTVHGYFSSIFHGGVDSLVDLMNKSFPELGIKKEDCKELSWIDTTIFYSGVVNYNTANFKKEILLDRSAGKKTAFSIKLDYVKKPIPETAMVKILEKLYEEDVGVGMYVLYPYGGIMDEISESAIPFPHRAGIMYELWYTASWEKQEDNEKHINWVRSVYNFTTPYVSKNPRLAYLNYRDLDLGKNNPESPNNYTQARIWGEKYFGKNFNRLVKVKTKVDPNNFFRNEQSIPPLPPHHH

SEQ ID NO: 574 - protein, 517 aa, Artificial Sequence
  Synthetic
NPQENFLKCFSQYIPNNVANPKLVYTQHDSLYMSILNSTIQNLRFTSDTTPKPLVIVTPSNVSHIQATILCSKKVGLQIRTRSGGHDAEGMSYISQVPFVIVDLRNMHSIKIDVHSQTAWVEAGATLGEVYYWINEKNENLSFPGGYCPTVGVGGHFSGGGYGALMRNYGLAADNIIDAHLVNVDGKVLDRKSMGEDLFWAIRGGGGENFGIIAAWKIKLVAVPSKVTIFSVKKNMEIHGLVKLFNKWQNIAYKYDKDLLLMTHFITRNITDNHGKNKTTVHGYFSSIFHGGVDSLVDLMNKSFPELGIKKTDCKELSWIDTTIFYSGVVNYNTANFKKEILLDRSAGKKTAFSIKLDYVKKPIPETAMVKILEKLYEEDVGVGMYVLYPYGGIMDEISESAIPFPHRAGIMYELWYTASWEKQEDNEKHINWVRSVYNFTTPYVSKNPRLAYLNYRDLDLGKNNPESPNNYTQARIWGEKYFGKNFNRLVKVKTKVDPNNFFRNEQSIPPLPPHHH

SEQ ID NO: 575 - protein, 517 aa, Artificial Sequence
  Synthetic
NPQENFLKCFSQYIPNNVANPKLVYTQHDQLYMSILNSTIQNLRFTSDTTPKPLVIVTPSNVSHIQATILCSKKVGLQIRTRSGGHDAEGMSYISQVPFVIVDLRNMHSIKIDVHSQTAWVEAGATLGEVYYWINEKNENLSFPGGYCPTVGVGGHFSGGGYGALMRNYGLAADNIIDAHLVNVDGKVLDRKSMGEDLFWAIRGGGGENFGIIAAWKIKLVAVPSKVTIFSVKKNMEIHGLVKLFNKWQNIAYKYDKDLLLMTHFITRNITDNHGKNKTTVHGYFSSIFHGGVDSLVDLMNKSFPELGIKKTDCKELSWIDTTIFYSGVVNYNTANFKKEILLDRSAGKKTAFSIKLDYVKKPIPETAMVKILEKLYEEDVGVGMYVLYPYGGIMDEISESAIPFPHRAGIMYELWYTASWEKQEDNEKHINWVRSVYNFTTPYVSQNPRLAYLNYRDLDLGKTNPESPNNYTQARIWGEKYFGKNFNRLVKVKTKVDPNNFFRNEQSIPPLPPHHH

SEQ ID NO: 576 - protein, 517 aa, Artificial Sequence
  Synthetic
NPQENFLKCFSQYIPNNVANPKLVYTQNDQLYMSILNSTIQNLRFTSDTTPKPLVIVTPSNVSHIQATILCSKKVGLQIRTRSGGHDAEGMSYISQVPFVIVDLRNMHSIKIDVHSQTAWVEAGATLGEVYYWINEKNENLSFPGGYCPTVGVGGHFSGGGYGALMRNYGLAADNIIDAHLVNVDGKVLDRKSMGEDLFWAIRGGGGENFGIIAAWKIKLVAVPSKSTIFSVKKNMEIHGLVKLFNKWQNIAYKYDKDLLLMTHFITRNITDNHGKNKTTVHGYFSSIFHGGVDSLVDLMNKSFPELGIKKTDCKELSWIDTTIFYSGVVNYNTANFKKEILLDRSAGKKTAFSIKLDYVKKPIPETAMVKILEKLYEEDVGVGMYVLYPYGGIMDEISESAIPFPHRAGIMYELWYTASWEKQEDNEKHINWVRSVYNFTTPYVSKNPRLAYLNYRDLDLGKTNPESPNNYTQARIWGEKYFGKNFNRLVKVKTKVDPNNFFRNEQSIPPLPPHHH

SEQ ID NO: 577 - protein, 517 aa, Artificial Sequence
  Synthetic
NPQENFLKCFSKHIPNNVANPKLVYTQHDQLYSSILNSTIQNLRFTSDTTPKPLVIVTPSNVSHIQATILCSKKVGLQIRTRSGGHDAEGMSYISQVPFVVVDLRNMHSIKIDVHSQTAWVEAGATLGEVYYWINEKNENLSFPGGYCPTVGVGGHFSGGGYGALMRNYGLAADNIIDAHLVNVDGKVLDRKSMGEDLFWAIRGGGGENFGIIAAWKIKLVPVPSKVTIFSVKKNMEIHGLVKLFNKWQNIAYKYDKDLVLMTHFITKNITDNHGKNKTTVHGYFSSIFHGGVDSLVDLMNKSFPELGIKKTDCKEFSWIDTTIFYSGVVNFNTANFKKEILLDRSAGKKTAFSIKLDYVKKPIPETAMVKILEKLYEEDVGAGMYVLYPYGGIMEEISESAIPFPHRAGIMYELWYTASWEKQEDNEKHINWVRSVYNFTTPYVSKNPRLAYLNYRDLDLGKNNEESPNNYTQARIWGEKYFGKNFNRLVKVKTKVDPNNFFRNEQSIPPLPPHHH

SEQ ID NO: 578 - protein, 517 aa, Artificial Sequence
  Synthetic
NPQENFLKCFSQYIPNNVANPKLVYTQHDQLYMSILNSTIQNLRFTSDTTPKPLVIVTPSNVSHIQATILCSKKVGLQIRTRSGGHDAEGMSYISQVPFVIVDLRNMHSIKIDVHSQTAWVEAGATLGEVYYWINEKNENLSFPGGYCPTVGVGGHFSGGGYGALMRNYGLAADNIIDAHLVNVDGKVLDRKSMGEDLFWAIRGGGGENFGIIAAWKIKLVAVPSKVTIFSVKKNMEIHGLVKLFNKWQNIAYKYDKDLLLMTHFITRNITDNHGKNKTTVHGYFSSIFHGGVDSLVDLMNKSFPELGIKKEDCKELSWIDTTIFYSGVVNYNTANFKKEILLDRSAGKKTAFSIKLDYVKKPIPETAMVKILEKLYEEDVGVGMYVLYPYGGIMDEISESAIPFPHRAGIMYELWYTASWEKQEDNEKHINWVRSVYNFTTPYVSKNPRLAYLNYRDLDLGKNNPESPNNYTQARIWGEKYFGKNFNRLVKVKTKVDPNNFFRNEQSIPPLPPHHH

SEQ ID NO: 579 - protein, 517 aa, Artificial Sequence
  Synthetic
NPRENFLKCFSKHIPNNVANPKLVYTQHDQLYMSILNSTIQNLRFISDTTPKPLVIVTPSNVSHIQATILCSKKVGLQIRTRSGGHDAEGMSYISQVPFVVVDLRNMHSIKIDVHSQTAWVEAGATLGEVYYWINEKNENLSFPGGYCPTVGVGGHFSGGGYGALMRNYGLAADNIIDAHLVNVDGKVLDRKSMGEDLFWAIRGGGGENFGIIAAWKIKLVDVPSKVTIFSVKKNMEIHGLVKLFNKWQNIAYKYDKDLVLMTHFITKNITDNHGKNKTTVHGYFSSIFHGGVDSLVDLMNKSFPELGIKKTDCKEFSWIDTTIFYSGVVNFNTANFKKEILLDRSAGKKTAFSIKLDYVKKPIPETAMVKILEKLYEEDVGAGMYVLYPYGGIMEEISESAIPFPHRAGIMYELWYTASWEKQEDNEKHINWVRSVYNFTTPYVSKNPRLAYLNYRDLDLGKNNEESPNNYTQARIWGEKYFGKNFNRLVKVKTKVDPNNFFRNEQSIPPLPPHHH

SEQ ID NO: 580 - protein, 517 aa, Artificial Sequence
  Synthetic
NPRENFLKCFSKHIPNNVANPKLVYTQHDQLYSSILNSTIQNLRFTSDTTPKPLVIVTPSNVSHIQATILCSKKVGLQIRTRSGGHDAEGMSYISQVPFVVVDLRNMHSIKIDVESQTAWVEAGATLGEVYYWINEKNENLSFPGGYCPTVGVGGHFSGGGYGALMRNYGLAADNIIDAHLVNVDGKVLDRKSMGEDLFWAIRGGGGENFGIIAAWKIKLVPVPSKVTIFSVKKNMEIHGLVKLFNKWQNIAYKYDKDLVLMTHFITKNITDNHGKNKTTVHGYFSSIFHGGVDSLVDLMNKSFPELGIKKTDCKEFSWIDTTIFYSGVVNFNTANFKKEILLDRSAGKKTAFSIKLDYVKKPIPETAMVKILEKLYEEDVGAGMYVLYPYGGIMEEISESAIPFPHRAGIMYELWYTASWEKQEDNEKHINWVRSVYNFTTPYVSKNPRLAYLNYRDLDLGKNNEESPNNYTQARIWGEKYFGKNFNRLVKVKTKVDPNNFFRNEQSIPPLPPHHH

SEQ ID NO: 581 - protein, 517 aa, Artificial Sequence
  Synthetic
NPQENFLKCFSKHIPNNPANPKLVYTQHDQLYMSILNSTIQNLRFTSDTTPKPLVIVTPSNVSHIQATILCSKKVGLQIRTRSGGHDAEGMSYISQVPFVVVDLRNMHSIKIDVHSQTAWVEAGATLGEVYYWINEKNENLSFPGGYCPTVGVGGHFSGGGYGALMRNYGLAADNIIDAHLVNVDGKVLDRKSMGEDLFWAIRGGGGENFGIIAAWKIKLVDVPSKVTIFSVKKNMEIHGLVKLFNKWQNIAYKYDKDLVLMTHFITKNITDNHGKNKTTVHGYFSSIFHGGVDSLVDLMNKSFPELGIKKTDCKEFSWIDTTIFYSGVVNFNTANFKKEILLDRSAGKKTAFSIKLDYVKKPIPETAMVKILEKLYEEDVGAGMYVLYPYGGIMEEISESAIPFPHRAGIMYELWYTASWEKQEDNEKHINWVRSVYNFTTPYVSKNPRLAYLNYRDLDLGKNNEASPNNYTQARIWGEKYFGKNFNRLVKVKTKVDPNNFFRNEQSIPPLPPHHH

SEQ ID NO: 582 - protein, 517 aa, Artificial Sequence
  Synthetic
NPQENFLKCFSQYIPNNVANPKLVYTQHDSLYSSILNSTIQNLRFTSDTTPKPLVIVTPSNVSHIQATILCSKKVGLQIRTRSGGHDAEGMSYISQVPFVIVDLRNMHSIKIDVESQTAWVEAGATLGEVYYWINEKNENLSFPGGYCPTVGVGGHFSGGGYGALMRNYGLAADNIIDAHLVNVDGKVLDRKSMGEDLFWAIRGGGGENFGIIAAWKIKLVAVPSKVTIFSVKKNMEIHGLVKLFNKWQNIAYKYDKDLLLMTHFITRNITDNHGKNKTTVHGYFSSIFHGGVDSLVDLMNKSFPELGIKKEDCKELSWIDTTIFYSGVVNYNTANFKKEILLDRSAGKKTAFSIKLDYVKKPIPETAMVKILEKLYEEDVGVGMYVLYPYGGIMDEISESAIPFPHRAGIMYELWYTASWEKQEDNEKHINWVRSVYNFTTPYVSQNPRLAYLNYRDLDLGKNNPESPNNYTQARIWGEKYFGKNFNRLVKVKTKVDPNNFFRNEQSIPPLPPHHH

SEQ ID NO: 583 - protein, 517 aa, Artificial Sequence
  Synthetic
NPRENFLKCFSKHIPNNVANPKLVYTQHDQLYMSILNSTIQNLRFISDTTPKPLVIVTPSNVSHIQATILCSKKVGLQIRTRSGGHDAEGMSYISQVPFVVVDLRNMHSIKIDVHSQTAWVEAGATLGEVYYWINEKNENLSFPGGYCPTVGVGGHFSGGGYGALMRNYGLAADNIIDAHLVNVDGKVLDRKSMGEDLFWAIRGGGGENFGIIAAWKIKLVPVPSKVTIFSVKKNMEIHGLVKLFNKWQNIAYKYDKDLVLMTHFITKNITDNHGKNKTTVHGYFSSIFHGGVDSLVDLMNKSFPELGIKKTDCKEFSWIDTTIFYSGVVNFNTANFKKEILLDRSAGKKTAFSIKLDYVKKPIPETAMVKILEKLYEEDVGAGMYVLYPYGGIMEEISESAIPFPHRAGIMYELWYTASWEKQEDNEKHINWVRSVYNFTTPYVSKNPRLAYLNYRDLDLGKNNEASPNNYTQARIWGEKYFGKNFNRLVKVKTKVDPNNFFRNEQSIPPLPPHHH

SEQ ID NO: 584 - protein, 517 aa, Artificial Sequence
  Synthetic
NPQENFLKCFSQYIPNNPANPKLVYTQNDSLYSSILNSTIQNLRFTSDTTPKPLVIVTPSNVSHIQATILCSKKVGLQIRTRSGGHDAEGMSYISQVPFVIVDLRNMHSIKIDVESQTAWVEAGATLGEVYYWINEKNENLSFPGGYCPTVGVGGHFSGGGYGALMRNYGLAADNIIDAHLVNVDGKVLDRKSMGEDLFWAIRGGGGENFGIIAAWKIKLVAVPSKVTIFSVKKNMEIHGLVKLFNKWQNIAYKYDKDLLLMTHFITRNITDNHGKNKTTVHGYFSSIFHGGVDSLVDLMNKSFPELGIKKEDCKELSWIDTTIFFSGVVNYNTANFKKEILLDRSAGKKTAFSIKLDYVKKPIPETAMVKILEKLYEEDVGVGMYVLYPYGGIMDEISESAIPFPHRAGIMYELWYTASWEKQEDNEKHINWVRSVYNFTTPYVSKNPRLAYLNYRDLDLGKNNPESPNNYTQARIWGEKYFGKNFNRLVKVKTKVDPNNFFRNEQSIPPLPPHHH

SEQ ID NO: 585 - protein, 517 aa, Artificial Sequence
  Synthetic
NPQENFLKCFSQYIPNNPANPKLVYTQNDQLYSSILNSTIQNLRFTSDTTPKPLVIVTPSNVSHIQATILCSKKVGLQIRTRSGGHDAEGMSYISQVPFVIVDLRNMHSIKIDVHSQTAWVEAGATLGEVYYWINEKNENLSFPGGYCPTVGVGGHFSGGGYGALMRNYGLAADNIIDAHLVNVDGKVLDRKSMGEDLFWAIRGGGGENFGIIAAWKIKLVAVPSKVTIFSVKKNMEIHGLVKLFNKWQNIAYKYDKDLLLMTHFITRNITDNHGKNKTTVHGYFSSIFHGGVDSLVDLMNKSFPELGIKKEDCKELSWIDTTIFYSGVVNYNTANFKKEILLDRSAGKKTAFSIKLDYVKKPIPETAMVKILEKLYEEDVGVGMYVLYPYGGIMDEISESAIPFPHRAGIMYELWYTASWEKQEDNEKHINWVRSVYNFTTPYVSQNPRLAYLNYRDLDLGKNNPESPNNYTQARIWGEKYFGKNFNRLVKVKTKVDPNNFFRNEQSIPPLPPHHH

SEQ ID NO: 586 - protein, 517 aa, Artificial Sequence
  Synthetic
NPQENFLKCFSQYIPTNPTNAKLVYTQNDSFYSSILNSTIQNLRFTSDTTPKPLVIITPLNVSHIQGTILCSKKVGLQIRTRSGGHDAEGMSYISQVPFVVVDLRNMHSIKIDVESQTAWVEAGATLGEVYYWINEKNENLSFPGGYCPTVGVGGHFSGGGYGALMRNYGLAADNIIDAHLVNVDGKVLDRKSMGEDLFWAIRGGGGENFGIIAAWKIKLVAVPSKVTIFSVKKNMEIHGLVKLFNKWQNIAYKYDKDLVLMTHFITKNITDNHGKNKTTVHGYFSSIFHGGVDSLVDLMNKSFPELGIKKTDCKEFSWIDTTIFYSGVVNFNTANFKKEILLDRSAGKKTAFSIKLDYVKKPIPETAMVKILEKLYEEDVGAGMYVLYPYGGIMEEISESAIPFPHRAGIMYELWYTASWEKQEDNEKHINWVRSVYNFTTPYVSKNPRLAYLNYRDLDLGKNNEESPNNYTQARIWGEKYFGKNFNRLVKVKTKVDPNNFFRNEQSIPPLPLRHH

SEQ ID NO: 587 - protein, 517 aa, Artificial Sequence
  Synthetic
NPQENFLKCFSQYIPNNVANPKLVYTQHDQLYMSILNSTIQNLRFTSNTTPKPLVIVTPSNVSHIQATILCSKKVGLQIRTRSGGHDAEGMSYISQVPFVIVDLRNMHSIKIDVHSQTAWVEAGATLGELYYWINEKNENLSFPGGYCPTVGVGGHFSGGGYGALMRNYGLAADNIIDAHLVNVDGKVLDRKSMGEDLFWAIRGGGGENFGIIAAWKIKLVAVPSKSTIFSVKKNMEIHGLVKLFNKWQNIAYKYDKDLLLMTHFITRNITDNHGKNKTTVHGYFSSIFHGGVDSLVDLMNKSFPELGIKKEDCKELSWIDTTIFFSGVVNYNTANFKKEILLDRSAGKKTAFSIKLDYVKKPIPETAMVKILEKLYEEDVGVGMYVLYPYGGIMDEISESAIPFPHRAGIMYELWYTASWEKQEDNEKHINWVRSVYNFTTPYVSQNPRLAYLNYRDLDLGKTNPESPNNYTQARIWGEKYFGKNFNRLVKVKTKVDPNNFFRNEQSIPPLPPHHH

SEQ ID NO: 588 - protein, 517 aa, Artificial Sequence
  Synthetic
NPQENFLKCFSKHIPNNPANPKLVYTQHDQLYSSILNSTIQNLRFTSDTTPKPLVIVTPSNVSHIQATILCSKKVGLQIRTRSGGHDAEGMSYISQVPFVVVDLRNMHSIKIDVHSQTAWVEAGATLGEVYYWINEKNENLSFPGGYCPTVGVGGHFSGGGYGALMRNYGLAADNIIDAHLVNVDGKVLDRKSMGEDLFWAIRGGGGENFGIIAAWKIKLVPVPSKVTIFSVKKNMEIHGLVKLFNKWQNIAYKYDKDLVLMTHFITKNITDNHGKNKTTVHGYFSSIFHGGVDSLVDLMNKSFPELGIKKTDCKEFSWIDTTIFYSGVVNFNTANFKKEILLDRSAGKKTAFSIKLDYVKKPIPETAMVKILEKLYEEDVGAGMYVLYPYGGIMEEISESAIPFPHRAGIMYELWYTASWEKQEDNEKHINWVRSVYNFTTPYVSQNPRLAYLNYRDLDLGKNNEESPNNYTQARIWGEKYFGKNFNRLVKVKTKVDPNNFFRNEQSIPPLPPHHH

SEQ ID NO: 589 - protein, 517 aa, Artificial Sequence
  Synthetic
NPQENFLKCFSQYIPTNVTNAKLVYTQHDQFYSSILNSTIQNLRFTSDTTPKPLVIITPLNVSHIQGTILCSKKVGLQIRTRSGGHDAEGMSYISQVPFVVVDLRNMHSIKIDVESQTAWVEAGATLGEVYYWINEKNENLSFPGGYCPTVGVGGHFSGGGYGALMRNYGLAADNIIDAHLVNVDGKVLDRKSMGEDLFWAIRGGGGENFGIIAAWKIKLVAVPSKVTIFSVKKNMEIHGLVKLFNKWQNIAYKYDKDLVLMTHFITKNITDNHGKNKTTVHGYFSSIFHGGVDSLVDLMNKSFPELGIKKEDCKEFSWIDTTIFYSGVVNFNTANFKKEILLDRSAGKKTAFSIKLDYVKKPIPETAMVKILEKLYEEDVGAGMYVLYPYGGIMDEISESAIPFPHRAGIMYELWYTASWEKQEDNEKHINWVRSVYNFTTPYVSQNPRLAYLNYRDLDLGKNNEESPNNYTQARIWGEKYFGKNFNRLVKVKTKVDPNNFFRNEQSIPPLPLRHH

SEQ ID NO: 590 - protein, 517 aa, Artificial Sequence
  Synthetic
NPQENFLKCFSKHIPNNVANPKLVYTQHDQLYSSILNSTIQNLRFTSDTTPKPLVIVTPSNVSHIQATILCSKKVGLQIRTRSGGHDAEGMSYISQVPFVVVDLRNMHSIKIDVHSQTAWVEAGATLGEVYYWINEKNENLSFPGGYCPTVGVGGHFSGGGYGALMRNYGLAADNIIDAHLVNVDGKVLDRKSMGEDLFWAIRGGGGENFGIIAAWKIKLVPVPSKVTIFSVKKNMEIHGLVKLFNKWQNIAYKYDKDLVLMTHFITKNITDNHGKNKTTVHGYFSSIFHGGVDSLVDLMNKSFPELGIKKTDCKEFSWIDTTIFYSGVVNFNTANFKKEILLDRSAGKKTAFSIKLDYVKKPIPETAMVKILEKLYEEDVGAGMYVLYPYGGIMEEISESAIPFPHRAGIMYELWYTASWEKQEDNEKHINWVRSVYNFTTPYVSQNPRLAYLNYRDLDLGKNNEASPNNYTQARIWGEKYFGKNFNRLVKVKTKVDPNNFFRNEQSIPPLPPHHH

SEQ ID NO: 591 - protein, 517 aa, Artificial Sequence
  Synthetic
NPQENFLKCFSQYIPNNVANPKLVYTQHDQLYMSILNSTIQNLRFTSDTTPKPLVIVTPSNVSHIQATILCSKKVGLQIRTRSGGHDAEGMSYISQVPFVIVDLRNMHSIKIDVHSQTAWVEAGATLGEVYYWINEKNENLSFPGGYCPTVGVGGHFSGGGYGALMRNYGLAADNIIDAHLVNVDGKVLDRKSMGEDLFWAIRGGGGENFGIIAAWKIKLVAVPSKSTIFSVKKNMEINGLVKLFNKWQNIAYKYDKDLLLMTHFITRNITDNHGKNKTTVHGYFSSIFHGGVDSLVDLMNKSFPELGIKKTDCKELSWIDTTIFYSGVVNYNTANFKKEILLDRSAGKKTAFSIKLDYVKKPIPETAMVKILEKLYEEDVGVGMYVLYPYGGIMDEISESAIPFPHRAGIMYELWYTASWEKQEDNEKHINWVRSVYNFTTPYVSQNPRLAYLNYRDLDLGKTNPESPNNYTQARIWGEKYFGKNFNRLVKVKTKVDPNNFFRNEQSIPPLPPHHH

SEQ ID NO: 592 - protein, 517 aa, Artificial Sequence
  Synthetic
NPQENFLKCFSKHIPNNVANPKLVYTQNDQLYSSILNSTIQNLRFTSDTTPKPLVIVTPSNVSHIQATILCSKKVGLQIRTRSGGHDAEGMSYISQVPFVVVDLRNMHSIKIDVHSQTAWVEAGATLGEVYYWINEKNENLSFPGGYCPTVGVGGHFSGGGYGALMRNYGLAADNIIDAHLVNVDGKVLDRKSMGEDLFWAIRGGGGENFGIIAAWKIKLVPVPSKVTIFSVKKNMEIHGLVKLFNKWQNIAYKYDKDLVLMTHFITKNITDNHGKNKTTVHGYFSSIFHGGVDSLVDLMNKSFPELGIKKTDCKEFSWIDTTIFYSGVVNFNTANFKKEILLDRSAGKKTAFSIKLDYVKKPIPETAMVKILEKLYEEDVGAGMYVLYPYGGIMEEISESAIPFPHRAGIMYELWYTASWEKQEDNEKHINWVRSVYNFTTPYVSQNPRLAYLNYRDLDLGKNNEESPNNYTQARIWGEKYFGKNFNRLVKVKTKVDPNNFFRNEQSIPPLPPHHH

SEQ ID NO: 593 - protein, 517 aa, Artificial Sequence
  Synthetic
NPQENFLKCFSQYIPNNVANPKLVYTQHDQLYMSILNSTIQNLRFTSDTTPKPLVIVTPSNVSHIQATILCSKKVGLQIRTRSGGHDAEGMSYISQVPFVIVDLRNMHSIKIDVESQTAWVEAGATLGEVYYWINEKNENLSFPGGYCPTVGVGGHFSGGGYGALMRNYGLAADNIIDAHLVNVDGKVLDRKSMGEDLFWAIRGGGGENFGIIAAWKIKLVAVPSKVTIFSVKKNMEIHGLVKLFNKWQNIAYKYDKDLLLMTHFITRNITDNHGKNKTTVHGYFSSIFHGGVDSLVDLMNKSFPELGIKKTDCKELSWIDTTIFYSGVVNYNTANFKKEILLDRSAGKKTAFSIKLDYVKKPIPETAMVKILEKLYEEDVGVGMYVLYPYGGIMDEISESAIPFPHRAGIMYELWYTASWEKQEDNEKHINWVRSVYNFTTPYVSQNPRLAYLNYRDLDLGKTNPESPNNYTQARIWGEKYFGKNFNRLVKVKTKVDPNNFFRNEQSIPPLPPHHH

SEQ ID NO: 594 - protein, 517 aa, Artificial Sequence
  Synthetic
NPQENFLKCFSQYIPNNVANPKLVYTQHDQLYMSILNSTIQNLRFTSDTTPKPLVIVTPSDVSHIQATILCSKKVGLQIRTRSGGHDAEGMSYISQVPFVIVDLRNMHSIKIDVESQTAWVEAGATLGEVYYWINEKNENLSFPGGYCPTVGVGGHFSGGGYGALMRNYGLAADNIIDAHLVNVDGKVLDRKSMGEDLFWAIRGGGGENFGIIAAWKIKLVAVPSKSTIFSVKKNMEIHGLVKLFNKWQNIAYKYDKDLLLMTHFITRNITDNHGKNKTTVHGYFSSIFHGGVDSLVDLMNKSFPELGIKKTDCKELSWIDTTIFYSGVVNYNTANFKKEILLDRSAGKKTAFSIKLDYVKKPIPETAMVKILEKLYEEDVGVGMYVLYPYGGIMDEISESAIPFPHRAGIMYELWYTASWEKQEDNEKHINWVRSVYNFTTPYVSQNPRLAYLNYRDLDLGKTNPESPNNYTQARIWGEKYFGKNFNRLVKVKTKVDPNNFFRNEQSIPPLPPHHH

SEQ ID NO: 595 - protein, 517 aa, Artificial Sequence
  Synthetic
NPQENFLKCFSQYIPNNVANPKLVYTQHDQLYMSILNSTIQNLRFTSDTTPKPLVIVTPSNVSHIQATILCSKKVGLQIRTRSGGHDAEGMSYISQVPFVIVDLRNMHSIKIDVHSQTAWVEAGATLGEVYYWINEKNENLSFPGGYCPTVGVGGHFSGGGYGALMRNYGLAADNIIDAHLVNVDGKVLDRKSMGEDLFWAIRGGGGENFGIIAAWKIKLVAVPSKSTIFSVKKNMEIHGLVKLFNKWQNIAYKYDKDLLLMTHFITRNITDNHGKNKTTVHGYFSSIFHGGVDSLVDLMNKSFPELGIKKTDCKELSWIDTTIFYSGVVNYNTANFKKEILLDRSAGKKTAFSIKLDYVKKPIPETAMVKILEKLYEEDVGVGMYVLVPYGGIMDEISESAIPFPHRAGIMYELWYTASWEKQEDNEKHINWVRSVYNFTTPYVSQNPRLAYLNYRDLDLGKTNPESPNNYTQARIWGEKYFGKNFNRLVKVKTKVDPNNFFRNEQSIPPLPPHHH

SEQ ID NO: 596 - protein, 517 aa, Artificial Sequence
  Synthetic
NPQENFLKCFSQYIPNNVANPKLVYTQHDQLYMSILNSTIQNLRFTSDTTPKPLVIVTPSNVSHIQATILCSKKVGLQIRTRSGGHDAEGMSYISQVPFVIVDLRNMHSIKIDVHSQTAWVEAGATLGEVYYWINEKNENLSFPGGYCPTVGVGGHFSGGGYGALMRNYGLAADNIIDAHLVNVDGKVLDRKSMGEDLFWAIRGGGGENFGIIAAWKIKLVAVPSKSTIFSVKKNMEIHGLVKLFNKWQNIAYKYDKDLLLMTHFITRNITDNHGKNKTTVHGYFSSIFHGGVDSLVDLMNKSFPELGIKKTDCKELSWIDTTIFYSGVVNYNTANFKKEILLDRSAGKKTAFSIKLDYVKKPIPETAMVKILEKLYEEDVGVGMYVLYPYGGIMDEISESAIPFPHRAGIMYELWYTASWEKQEDNEKHINWVRSVYNFTTPYVSQNPRLAYLNYRDLDLGMTNPESPNNYTQARIWGEKYFGKNFNRLVKVKTKVDPNNFFRNEQSIPPLPPHHH

SEQ ID NO: 597 - protein, 517 aa, Artificial Sequence
  Synthetic
NPQENFLKCFSQYIPTNPTNAKLVYTQNDQFYSSILNSTIQNLRFTSDTTPKPLVIITPLNVSHIQGTILCSKKVGLQIRTRSGGHDAEGMSYISQVPFVVVDLRNMHSIKIDVHSQTAWVEAGATLGEVYYWINEKNENLSFPGGYCPTVGVGGHFSGGGYGALMRNYGLAADNIIDAHLVNVDGKVLDRKSMGEDLFWAIRGGGGENFGIIAAWKIKLVAVPSKVTIFSVKKNMEIHGLVKLFNKWQNIAYKYDKDLVLMTHFITKNITDNHGKNKTTVHGYFSSIFHGGVDSLVDLMNKSFPELGIKKTDCKEFSWIDTTIFYSGVVNFNTANFKKEILLDRSAGKKTAFSIKLDYVKKPIPETAMVKILEKLYEEDVGAGMYVLYPYGGIMEEISESAIPFPHRAGIMYELWYTASWEKQEDNEKHINWVRSVYNFTTPYVSKNPRLAYLNYRDLDLGKNNEESPNNYTQARIWGEKYFGKNFNRLVKVKTKVDPNNFFRNEQSIPPLPLRHH

SEQ ID NO: 598 - protein, 517 aa, Artificial Sequence
  Synthetic
NPRENFLKCFSKHIPNNPANPKLVYTQNDQLYMSILNSTIQNLRFTSDTTPKPLVIVTPSNVSHIQATILCSKKVGLQIRTRSGGHDAEGMSYISQVPFVVVDLRNMHSIKIDVHSQTAWVEAGATLGEVYYWINEKNENLSFPGGYCPTVGVGGHFSGGGYGALMRNYGLAADNIIDAHLVNVDGKVLDRKSMGEDLFWAIRGGGGENFGIIAAWKIKLVPVPSKVTIFSVKKNMEIHGLVKLFNKWQNIAYKYDKDLVLMTHFITKNITDNHGKNKTTVHGYFSSIFHGGVDSLVDLMNKSFPELGIKKTDCKEFSWIDTTIFYSGVVNFNTANFKKEILLDRSAGKKTAFSIKLDYVKKPIPETAMVKILEKLYEEDVGAGMYVLYPYGGIMEEISESAIPFPHRAGIMYELWYTASWEKQEDNEKHINWVRSVYNFTTPYVSKNPRLAYLNYRDLDLGKNNEESPNNYTQARIWGEKYFGKNFNRLVKVKTKVDPNNFFRNEQSIPPLPPHHH

SEQ ID NO: 599 - protein, 517 aa, Artificial Sequence
  Synthetic
NPRENFLKCFSKHIPNNVANPKLVYTQHDQLYSSILNSTIQNLRFTSDTTPKPLVIVTPSNVSHIQATILCSKKVGLQIRTRSGGHDAEGMSYISQVPFVVVDLRNMHSIKIDVHSQTAWVEAGATLGEVYYWINEKNENLSFPGGYCPTVGVGGHFSGGGYGALMRNYGLAADNIIDAHLVNVDGKVLDRKSMGEDLFWAIRGGGGENFGIIAAWKIKLVPVPSKVTIFSVKKNMEIHGLVKLFNKWQNIAYKYDKDLVLMTHFITKNITDNHGKNKTTVHGYFSSIFHGGVDSLVDLMNKSFPELGIKKTDCKEFSWIDTTIFYSGVVNFNTANFKKEILLDRSAGKKTAFSIKLDYVKKPIPETAMVKILEKLYEEDVGAGMYVLYPYGGIMEEISESAIPFPHRAGIMYELWYTASWEKQEDNEKHINWVRSVYNFTTPYVSKNPRLAYLNYRDLDLGKNNEASPNNYTQARIWGEKYFGKNFNRLVKVKTKVDPNNFFRNEQSIPPLPPHHH

SEQ ID NO: 600 - protein, 517 aa, Artificial Sequence
  Synthetic
NPQENFLKCFSQYIPNNPANPKLIYTQNDSLYSSILNSTIQNLRFTSDTTPKPLVIVTPSNVSHIQATILCSKKVGLQIRTRSGGHDAEGMSYISQVPFVIVDLRNMHSIKIDVESQTAWVEAGATLGEVYYWINEKNENLSFPGGYCPTVGVGGHFSGGGYGALMRNYGLAADNIIDAHLVNVDGKVLDRKSMGEDLFWAIRGGGGENFGIIAAWKIKLVAVPSKVTIFSVKKNMEIHGLVKLFNKWQNIAYKYDKDLLLMTHFITRNITDNHGKNKTTVHGYFSSIFHGGVDSLVDLMNKSFPELGIKKTDCKELSWIDTIIFYSGVVNYNTANFKKEILLDRSAGKKTAFSIKLDYVKKPIPETAMVKILEKLYEEDVGVGMYVLYPYGGIMDEISESAIPFPHRAGIMYELWYTASWEKQEDNEKHINWVRSVYNFTTPYVSKNPRLAYLNYRDLDLGKNNPESPNNYTQARIWGEKYFGKNFNRLVKVKTKVDPNNFFRNEQSIPPLPPHHH

SEQ ID NO: 601 - protein, 517 aa, Artificial Sequence
  Synthetic
NPQENFLKCFSQYIPTNVTNAKLVYTQHDQFYMSILNSTIQNLRFTSDTTPKPLVIITPLNVSHIQGTILCSKKVGLQIRTRSGGHDAEGMSYISQVPFVVVDLRNMHSIKIDVHSQTAWVEAGATLGEVYYWINEKNENLSFPGGYCPTVGVGGHFSGGGYGALMRNYGLAADNIIDAHLVNVDGKVLDRKSMGEDLFWAIRGGGGENFGIIAAWKIKLVAVPSKVTIFSVKKNMEIHGLVKLFNKWQNIAYKYDKDLVLMTHFITKNITDNHGKNKTTVHGYFSSIFHGGVDSLVDLMNKSFPELGIKKEDCKEFSWIDTTIFYSGVVNFNTANFKKEILLDRSAGKKTAFSIKLDYVKKPIPETAMVKILEKLYEEDVGAGMYVLYPYGGIMEEISESAIPFPHRAGIMYELWYTASWEKQEDNEKHINWVRSVYNFTTPYVSKNPRLAYLNYRDLDLGKNNEESPNNYTQARIWGEKYFGKNFNRLVKVKTKVDPNNFFRNEQSIPPLPLRHH

SEQ ID NO: 602 - protein, 517 aa, Artificial Sequence
  Synthetic
NPQENFLKCFSQYIPNNVANPKLVYTQHDQLYMSILNSTIQNLRFTSDTTPKPLVIVTPSNVSHIQATILCSKKVGLQIRTRSGGHDAEGMSYISQVPFVIVDLRNMHSIKIDVHSQTAWVEAGATLGEVYYWINEKNENLSFPGGYCPTVGVGGHFSGGGYGALMRNYGLAADNIIDAHLVNVDGKVLDRKSMGEDLFWAIRGGGGENFGIIAAWKIKLVAVPSKVTIFSVKKNMEIHGLVKLFNKWQNIAYKYDKDLLLMTHFITRNITDNHGKNKTTVHGYFSSIFHGGVDSLVDLMNKSFPELGIKKTDCKELSWIDTTIFYSGVVNYNTANFKKEILLDRSAGKKTAFSIKLDYVKKPIPETAMVKILEKLYEEDVGVGMYVLYPYGGIMDEISESAIPFPHRAGIMYELWYIASWEKQEDNEKHINWVRSVYNFTTPYVSQNPRLAYLNYRDLDLGKTNPESPNNYTQARIWGEKYFGKNFNRLVKVKTKVDPNNFFRNEQSIPPLPPHHH

SEQ ID NO: 603 - protein, 517 aa, Artificial Sequence
  Synthetic
NPQENFLKCFSKHIPNNVANPKLVYTQHDQLYMSILNSTIQNLRFTSDTTPKPLVIVTPSNVSHIQATILCSKKVGLQIRTRSGGHDAEGMSYISQVPFVVVDLRNMHSIKIDVHSQTAWVEAGATLGEVYYWINEKNENLSFPGGYCPTVGVGGHFSGGGYGALMRNYGLAADNIIDAHLVNVDGKVLDRKSMGEDLFWAIRGGGGENFGIIAAWKIKLVDVPSKVTIFSVKKNMEIHGLVKLFNKWQNIAYKYDKDLVLMTHFITKNITDNHGKNKTTVHGYFSSIFHGGVDSLVDLMNKSFPELGIKKTDCKEFSWIDTTIFYSGVVNFNTANFKKEILLDRSAGKKTAFSIKLDYVKKPIPETAMVKILEKLYEEDVGAGMYVLYPYGGIMEEISESAIPFPHRAGIMYELWYTASWEKQEDNEKHINWVRSVYNFTTPYVSQNPRLAYLNYRDLDLGKTNHASPNNYTQARIWGEKYFGKNFNRLVKVKTKVDPNNFFRNEQSIPPLPPHHH

SEQ ID NO: 604 - protein, 517 aa, Artificial Sequence
  Synthetic
NPQENFLKCFSQYIPNNVANPKLVYTQHDQLYSSILNSTIQNLRFTSDTTPKPLVIVTPSNVSHIQATILCSKKVGLQIRTRSGGHDAEGMSYISQVPFVIVDLRNMHSIKIDVHSQTAWVEAGATLGEVYYWINEKNENLSFPGGYCPTVGVGGHFSGGGYGALMRNYGLAADNIIDAHLVNVDGKVLDRKSMGEDLFWAIRGGGGENFGIIAAWKIKLVAVPSKVTIFSVKKNMEIHGLVKLFNKWQNIAYKYDKDLLLMTHFITRNITDNHGKNKTTVHGYFSSIFHGGVDSLVDLMNKSFPELGIKKTDCKELSWIDTTIFYSGVVNYNTANFKKEILLDRSAGKKTAFSIKLDYVKKPIPETAMVKILEKLYEEDVGVGMYVLYPYGGIMDEISESAIPFPHRAGIMYELWYTASWEKQEDNEKHINWVRSVYNFTTPYVSQNPRLAYLNYRDLDLGKTNPESPNNYTQARIWGEKYFGKNFNRLVKVKTKVDPNNFFRNEQSIPPLPPHHH

SEQ ID NO: 605 - protein, 517 aa, Artificial Sequence
  Synthetic
NPQENFLKCFSQYIPNNPANPKLVYTQHDSLYMSILNSTIQNLRFTSDTTPKPLVIVTPSNVSHIQATILCSKKVGLQIRTRSGGHDAEGMSYISQVPFVIVDLRNMHSIKIDVHSQTAWVEAGATLGEVYYWINEKNENLSFPGGYCPTVGVGGHFSGGGYGALMRNYGLAADNIIDAHLVNVDGKVLDRKSMGEDLFWAIRGGGGENFGIIAAWKIKLVAVPSKVTIFSVKKNMEIHGLVKLFNKWQNIAYKYDKDLLLMTHFITRNITDNHGKNKTTVHGYFSSIFHGGVDSLVDLMNKSFPELGIKKTDCKELSWIDTTIFYSGVVNYNTANFKKEILLDRSAGKKTAFSIKLDYVKKPIPETAMVKILEKLYEEDVGVGMYVLYPYGGIMDEISESAIPFPHRAGIMYELWYTASWEKQEDNEKHINWVRSVYNFTTPYVSQNPRLAYLNYRDLDLGKNNPESPNNYTQARIWGEKYFGKNFNRLVKVKTKVDPNNFFRNEQSIPPLPPHHH

SEQ ID NO: 606 - skipped

SEQ ID NO: 607 - DNA, 12 bp, Saccharomyces cerevisiae
cacgatgaattg

SEQ ID NO: 608 - protein, 20 aa, Saccharomyces cerevisiae
KLKTVRSAVLSSLFASQVLG

SEQ ID NO: 609 - DNA, 60 bp, Saccharomyces cerevisiae
aaactgaaaactgtaagatctgcggtcctttcgtcactctttgcatcgcaggttctcggt

SEQ ID NO: 610 - protein, 31 aa, Saccharomyces cerevisiae
IRSVRRVFIYVSIFVLIIVLKRTLSGTDQTS

SEQ ID NO: 611 - DNA, 93 bp, Saccharomyces cerevisiae
attagatctgtgagaagggttttcatttacgtctcaatattcgtattgataatagttttgaaaagaacattaagtggcacagatcaaacgtca

SEQ ID NO: 612 - protein, 17 aa, Saccharomycopsis fibuligera
IRLTVFLTAVFAAVASC

SEQ ID NO: 613 - DNA, 51 bp, Saccharomycopsis fibuligera
atcagattgaccgttttcttgaccgctgtttttgctgctgttgcttcttgt

SEQ ID NO: 614 - protein, 21 aa, Saccharomyces cerevisiae
RQVWFSWIVGLFLCFFNVSSA

SEQ ID NO: 615 - DNA, 63 bp, Saccharomyces cerevisiae
aggcaggtttggttctcttggattgtgggattgttcctatgttttttcaacgtgtcttctgct

SEQ ID NO: 616 - protein, 19 aa, Unknown
  Saccharomyces kudriavzevii
LSKVLLNIAFKVLLTTAKR

SEQ ID NO: 617 - DNA, 57 bp, Unknown
  Saccharomyces kudriavzevii
ctatccaaggtattgctgaatatagctttcaaggtgctgttaaccaccgccaagaga

SEQ ID NO: 618 - protein, 23 aa, Saccharomyces cerevisiae
KSFITRNKTAILATVAATGTAIG

SEQ ID NO: 619 - DNA, 69 bp, Saccharomyces cerevisiae
aagagcttcattacaaggaacaagacagccattttggcaaccgttgctgctacaggtactgccatcggt

SEQ ID NO: 620 - protein, 31 aa, Saccharomyces cerevisiae
IRSVRRVFIYVSIFVLIIVLKRLLLGTDQTS

SEQ ID NO: 621 - DNA, 93 bp, Saccharomyces cerevisiae
attagatctgtgagaagggttttcatttacgtctcaatattcgtattgataatagttttgaaaagattattattgggcacagatcaaacgtca

SEQ ID NO: 622 - protein, 56 aa, Saccharomyces cerevisiae
SATKSIVGEALEYVNIGLSHFLALPLAQRISLIIIIPFIYNIVWQLLYSLRKDRPP

SEQ ID NO: 623 - DNA, 168 bp, Saccharomyces cerevisiae
tctgctaccaagtcaatcgttggagaggcattggaatacgtaaacattggtttaagtcatttcttggctttaccattggcccaaagaatctctttgatcataataattcctttcatttacaatattgtatggcaattactatattctttgagaaaggaccgtccacct

SEQ ID NO: 624 - protein, 110 aa, Saccharomyces cerevisiae
KAFTSLLCGLGLSTTLAKAISLQRPLGLDKDVLLQAAEKFGLDLDLDHLLKELDSNVLDAWAQIEHLYPNQVMSLETSTKPKFPEAIKTKKDWDFVVKNDAIENYQLRVN

SEQ ID NO: 625 - DNA, 330 bp, Saccharomyces cerevisiae
aaagcattcaccagtttactatgtggactaggcctgtccactacactcgctaaggccatctcattgcaaagaccgttgggtctagataaggacgttttgctgcaagctgcggaaaaatttggtttggacctcgacctggatcatctcttgaaggagttggactccaatgtattggacgcttgggcccaaatagagcatttgtacccaaaccaggttatgagccttgaaacttccactaagccaaaattccctgaagcaatcaaaacgaagaaagactgggactttgtggtcaagaatgacgcaattgaaaactatcagcttcgtgtcaac

SEQ ID NO: 626 - protein, 23 aa, Saccharomyces cerevisiae
FSLKALLPLALLLVSANQVAAKV

SEQ ID NO: 627 - DNA, 69 bp, Saccharomyces cerevisiae
ttcagcttgaaagcattattgccattggccttgttgttggtcagcgccaaccaagttgctgcaaaagtc

SEQ ID NO: 628 - protein, 75 aa, Saccharomyces cerevisiae
FSLKALLPLALLLVSANQVAAKVHKAKIYKHELSDEMKEVTFEQHLAHLGQKYLTQFEKANPEVVFSREHPFFTE

SEQ ID NO: 629 - DNA, 225 bp, Saccharomyces cerevisiae
ttcagcttgaaagcattattgccattggccttgttgttggtcagcgccaaccaagttgctgcaaaagtccacaaggctaaaatttataaacacgagttgtccgatgagatgaaagaagtcactttcgagcaacatttagctcatttaggccaaaagtacttgactcaatttgagaaagctaaccccgaagttgttttttctagggagcatcctttcttcactgaa

SEQ ID NO: 630 - protein, 3 aa, Saccharomyces cerevisiae
KLD

SEQ ID NO: 631 - DNA, 9 bp, Saccharomyces cerevisiae
aagctggac

SEQ ID NO: 632 - protein, 18 aa, Saccharomyces cerevisiae
MVYIGIAIFLFLVGLFMK

SEQ ID NO: 633 - DNA, 54 bp, Saccharomyces cerevisiae
atggtttatattggtatcgctatttttttgtttttggttggcctttttatgaaa

SEQ ID NO: 634 - protein, 3 aa, Saccharomyces cerevisiae
SKL

SEQ ID NO: 635 - DNA, 9 bp, Saccharomyces cerevisiae
agcaaacta

SEQ ID NO: 636 - protein, 4 aa, Saccharomyces cerevisiae
CVIA

SEQ ID NO: 637 - DNA, 12 bp, Saccharomyces cerevisiae
tgtgttattgct

SEQ ID NO: 638 - protein, 542 aa, Artificial Sequence
  Synthetic
MKLKTVRSAVLSSLFASQVLGNPQENFLKCFSEYIPNNPANPKFIYTQHDQLYMSVLNSTIQNLRFTSDTTPKPLVIVTPSNVSHIQASILCSKKVGLQIRTRSGGHDAEGMSYISQVPFVVVDLRNMHSIKIDVHSQTAWVEAGATLGEVYYWINEKNENFSFPGGYCPTVGVGGHFSGGGYGALMRNYGLAADNIIDAHLVNVDGKVLDRKSMGEDLFWAIRGGGGENFGIIAAWKIKLVAVPSKSTIFSVKKNMEIHGLVKLFNKWQNIAYKYDKDLVLMTHFITKNITDNHGKNKTTVHGYFSSIFHGGVDSLVDLMNKSFPELGIKKTDCKEFSWIDTTIFYSGVVNFNTANFKKEILLDRSAGKKTAFSIKLDYVKKPIPETAMVKILEKLYEEDVGVGMYVLYPYGGIMEEISESAIPFPHRAGIMYELWYTASWEKQEDNEKHINWVRSVYNFTTPYVSQNPRLAYLNYRDLDLGKTNPESPNNYTQARIWGEKYFGKNFNRLVKVKTKADPNNFFRNEQSIPPLPPHHHHDEL

SEQ ID NO: 639 - DNA, 1629 bp, Artificial Sequence
  Synthetic
atgaaactgaaaactgtaagatctgcggtcctttcgtcactctttgcatcgcaggttctcggtaacccgcaagaaaactttctaaaatgcttttctgaatacattcctaacaaccctgccaacccgaagtttatctacacacaacacgatcaattgtatatgagcgtgttgaatagtacaatacagaacctgaggtttacatccgacacaacgccgaaaccgctagtgatcgtcacaccctccaacgtaagccacattcaggcaagcattttatgcagcaagaaagtcggactgcagataaggacgaggtccggaggacacgacgccgaagggatgagctatatctcccaggtaccttttgtggtggtagacttgagaaatatgcactctatcaagatagacgttcactcccaaaccgcttgggttgaggcgggagccacccttggtgaggtctactactggatcaacgaaaagaatgaaaattttagctttcctgggggatattgcccaactgtaggtgttggcggccacttctcaggaggcggttatggggccttgatgcgtaactacggacttgcggccgacaacattatagacgcacatctagtgaatgtagacggcaaagttttagacaggaagagcatgggtgaggatcttttttgggcaattagaggcggagggggagaaaattttggaattatcgctgcttggaaaattaagctagttgcggtaccgagcaaaagcactatattctctgtaaaaaagaacatggagatacatggtttggtgaagctttttaataagtggcaaaacatcgcgtacaagtacgacaaagatctggttctgatgacgcattttataacgaaaaatatcaccgacaaccacggaaaaaacaaaaccacagtacatggctacttctctagtatatttcatgggggagtcgattctctggttgatttaatgaacaaatcattcccagagttgggtataaagaagacagactgtaaggagttctcttggattgacacaactatattctattcaggcgtagtcaactttaacacggcgaatttcaaaaaagagatccttctggacagatccgcaggtaagaaaactgcgttctctatcaaattggactatgtgaagaagcctattcccgaaaccgcgatggtcaagatacttgagaaattatacgaggaagatgtgggagttggaatgtacgtactttatccctatggtgggataatggaagaaatcagcgagagcgccattccatttccccatcgtgccggcatcatgtacgagctgtggtatactgcgagttgggagaagcaagaagacaacgaaaagcacattaactgggtcagatcagtttacaatttcaccaccccatacgtgtcccagaatccgcgtctggcttacttgaactaccgtgatcttgacctgggtaaaacgaacccggagtcacccaacaattacactcaagctagaatctggggagagaaatactttgggaagaacttcaacaggttagtaaaggttaaaaccaaggcagatccaaacaacttttttagaaatgaacaatccattcccccgctacccccgcaccatcaccacgatgaattgtaa

SEQ ID NO: 640 - protein, 541 aa, Artificial Sequence
  Synthetic
MKLKTVRSAVLSSLFASQVLGNPQENFLKCFSEYIPNNPANPKFIYTQHDQLYMSVLNSTIQNLRFTSDTTPKPLVIVTPSNVSHIQASILCSKKVGLQIRTRSGGHDAEGMSYISQVPFVVVDLRNMHSIKIDVHSQTAWVEAGATLGEVYYWINEKNENFSFPGGYCPTVGVGGHFSGGGYGALMRNYGLAADNIIDAHLVNVDGKVLDRKSMGEDLFWAIRGGGGENFGIIAAWKIKLVAVPSKSTIFSVKKNMEIHGLVKLFNKWQNIAYKYDKDLVLMTHFITKNITDNHGKNKTTVHGYFSSIFHGGVDSLVDLMNKSFPELGIKKTDCKEFSWIDTTIFYSGVVNFNTANFKKEILLDRSAGKKTAFSIKLDYVKKPIPETAMVKILEKLYEEDVGVGMYVLYPYGGIMEEISESAIPFPHRAGIMYELWYTASWEKQEDNEKHINWVRSVYNFTTPYVSQNPRLAYLNYRDLDLGKTNPESPNNYTQARIWGEKYFGKNFNRLVKVKTKADPNNFFRNEQSIPPLPPHHHKLD

SEQ ID NO: 641 - DNA, 1626 bp, Artificial Sequence
  Synthetic
atgaaactgaaaactgtaagatctgcggtcctttcgtcactctttgcatcgcaggttctcggtaacccgcaagaaaactttctaaaatgcttttctgaatacattcctaacaaccctgccaacccgaagtttatctacacacaacacgatcaattgtatatgagcgtgttgaatagtacaatacagaacctgaggtttacatccgacacaacgccgaaaccgctagtgatcgtcacaccctccaacgtaagccacattcaggcaagcattttatgcagcaagaaagtcggactgcagataaggacgaggtccggaggacacgacgccgaagggatgagctatatctcccaggtaccttttgtggtggtagacttgagaaatatgcactctatcaagatagacgttcactcccaaaccgcttgggttgaggcgggagccacccttggtgaggtctactactggatcaacgaaaagaatgaaaattttagctttcctgggggatattgcccaactgtaggtgttggcggccacttctcaggaggcggttatggggccttgatgcgtaactacggacttgcggccgacaacattatagacgcacatctagtgaatgtagacggcaaagttttagacaggaagagcatgggtgaggatcttttttgggcaattagaggcggagggggagaaaattttggaattatcgctgcttggaaaattaagctagttgcggtaccgagcaaaagcactatattctctgtaaaaaagaacatggagatacatggtttggtgaagctttttaataagtggcaaaacatcgcgtacaagtacgacaaagatctggttctgatgacgcattttataacgaaaaatatcaccgacaaccacggaaaaaacaaaaccacagtacatggctacttctctagtatatttcatgggggagtcgattctctggttgatttaatgaacaaatcattcccagagttgggtataaagaagacagactgtaaggagttctcttggattgacacaactatattctattcaggcgtagtcaactttaacacggcgaatttcaaaaaagagatccttctggacagatccgcaggtaagaaaactgcgttctctatcaaattggactatgtgaagaagcctattcccgaaaccgcgatggtcaagatacttgagaaattatacgaggaagatgtgggagttggaatgtacgtactttatccctatggtgggataatggaagaaatcagcgagagcgccattccatttccccatcgtgccggcatcatgtacgagctgtggtatactgcgagttgggagaagcaagaagacaacgaaaagcacattaactgggtcagatcagtttacaatttcaccaccccatacgtgtcccagaatccgcgtctggcttacttgaactaccgtgatcttgacctgggtaaaacgaacccggagtcacccaacaattacactcaagctagaatctggggagagaaatactttgggaagaacttcaacaggttagtaaaggttaaaaccaaggcagatccaaacaacttttttagaaatgaacaatccattcccccgctacccccgcaccatcacaagctggactaa

SEQ ID NO: 642 - protein, 539 aa, Artificial Sequence
  Synthetic
MKFISTFLTFILAAVSVTANPQENFLKCFSEYIPNNPANPKFIYTQHDQLYMSVLNSTIQNLRFTSDTTPKPLVIVTPSNVSHIQASILCSKKVGLQIRTRSGGHDAEGMSYISQVPFVVVDLRNMHSIKIDVHSQTAWVEAGATLGEVYYWINEKNENFSFPGGYCPTVGVGGHFSGGGYGALMRNYGLAADNIIDAHLVNVDGKVLDRKSMGEDLFWAIRGGGGENFGIIAAWKIKLVAVPSKSTIFSVKKNMEIHGLVKLFNKWQNIAYKYDKDLVLMTHFITKNITDNHGKNKTTVHGYFSSIFHGGVDSLVDLMNKSFPELGIKKTDCKEFSWIDTTIFYSGVVNFNTANFKKEILLDRSAGKKTAFSIKLDYVKKPIPETAMVKILEKLYEEDVGVGMYVLYPYGGIMEEISESAIPFPHRAGIMYELWYTASWEKQEDNEKHINWVRSVYNFTTPYVSQNPRLAYLNYRDLDLGKTNPESPNNYTQARIWGEKYFGKNFNRLVKVKTKADPNNFFRNEQSIPPLPPHHHKLD

SEQ ID NO: 643 - DNA, 1620 bp, Artificial Sequence
  Synthetic
atgaaattcatttctacctttctcacttttattttagcggccgtttctgtcactgctaacccgcaagaaaactttctaaaatgcttttctgaatacattcctaacaaccctgccaacccgaagtttatctacacacaacacgatcaattgtatatgagcgtgttgaatagtacaatacagaacctgaggtttacatccgacacaacgccgaaaccgctagtgatcgtcacaccctccaacgtaagccacattcaggcaagcattttatgcagcaagaaagtcggactgcagataaggacgaggtccggaggacacgacgccgaagggatgagctatatctcccaggtaccttttgtggtggtagacttgagaaatatgcactctatcaagatagacgttcactcccaaaccgcttgggttgaggcgggagccacccttggtgaggtctactactggatcaacgaaaagaatgaaaattttagctttcctgggggatattgcccaactgtaggtgttggcggccacttctcaggaggcggttatggggccttgatgcgtaactacggacttgcggccgacaacattatagacgcacatctagtgaatgtagacggcaaagttttagacaggaagagcatgggtgaggatcttttttgggcaattagaggcggagggggagaaaattttggaattatcgctgcttggaaaattaagctagttgcggtaccgagcaaaagcactatattctctgtaaaaaagaacatggagatacatggtttggtgaagctttttaataagtggcaaaacatcgcgtacaagtacgacaaagatctggttctgatgacgcattttataacgaaaaatatcaccgacaaccacggaaaaaacaaaaccacagtacatggctacttctctagtatatttcatgggggagtcgattctctggttgatttaatgaacaaatcattcccagagttgggtataaagaagacagactgtaaggagttctcttggattgacacaactatattctattcaggcgtagtcaactttaacacggcgaatttcaaaaaagagatccttctggacagatccgcaggtaagaaaactgcgttctctatcaaattggactatgtgaagaagcctattcccgaaaccgcgatggtcaagatacttgagaaattatacgaggaagatgtgggagttggaatgtacgtactttatccctatggtgggataatggaagaaatcagcgagagcgccattccatttccccatcgtgccggcatcatgtacgagctgtggtatactgcgagttgggagaagcaagaagacaacgaaaagcacattaactgggtcagatcagtttacaatttcaccaccccatacgtgtcccagaatccgcgtctggcttacttgaactaccgtgatcttgacctgggtaaaacgaacccggagtcacccaacaattacactcaagctagaatctggggagagaaatactttgggaagaacttcaacaggttagtaaaggttaaaaccaaggcagatccaaacaacttttttagaaatgaacaatccattcccccgctacccccgcaccatcacaagctggactaa

SEQ ID NO: 644 - protein, 553 aa, Artificial Sequence
  Synthetic
MIRSVRRVFIYVSIFVLIIVLKRTLSGTDQTSNPQENFLKCFSEYIPNNPANPKFIYTQHDQLYMSVLNSTIQNLRFTSDTTPKPLVIVTPSNVSHIQASILCSKKVGLQIRTRSGGHDAEGMSYISQVPFVVVDLRNMHSIKIDVHSQTAWVEAGATLGEVYYWINEKNENFSFPGGYCPTVGVGGHFSGGGYGALMRNYGLAADNIIDAHLVNVDGKVLDRKSMGEDLFWAIRGGGGENFGIIAAWKIKLVAVPSKSTIFSVKKNMEIHGLVKLFNKWQNIAYKYDKDLVLMTHFITKNITDNHGKNKTTVHGYFSSIFHGGVDSLVDLMNKSFPELGIKKTDCKEFSWIDTTIFYSGVVNFNTANFKKEILLDRSAGKKTAFSIKLDYVKKPIPETAMVKILEKLYEEDVGVGMYVLYPYGGIMEEISESAIPFPHRAGIMYELWYTASWEKQEDNEKHINWVRSVYNFTTPYVSQNPRLAYLNYRDLDLGKTNPESPNNYTQARIWGEKYFGKNFNRLVKVKTKADPNNFFRNEQSIPPLPPHHHHDEL

SEQ ID NO: 645 - DNA, 1662 bp, Artificial Sequence
  Synthetic
atgattagatctgtgagaagggttttcatttacgtctcaatattcgtattgataatagttttgaaaagaacattaagtggcacagatcaaacgtcaaacccgcaagaaaactttctaaaatgcttttctgaatacattcctaacaaccctgccaacccgaagtttatctacacacaacacgatcaattgtatatgagcgtgttgaatagtacaatacagaacctgaggtttacatccgacacaacgccgaaaccgctagtgatcgtcacaccctccaacgtaagccacattcaggcaagcattttatgcagcaagaaagtcggactgcagataaggacgaggtccggaggacacgacgccgaagggatgagctatatctcccaggtaccttttgtggtggtagacttgagaaatatgcactctatcaagatagacgttcactcccaaaccgcttgggttgaggcgggagccacccttggtgaggtctactactggatcaacgaaaagaatgaaaattttagctttcctgggggatattgcccaactgtaggtgttggcggccacttctcaggaggcggttatggggccttgatgcgtaactacggacttgcggccgacaacattatagacgcacatctagtgaatgtagacggcaaagttttagacaggaagagcatgggtgaggatcttttttgggcaattagaggcggagggggagaaaattttggaattatcgctgcttggaaaattaagctagttgcggtaccgagcaaaagcactatattctctgtaaaaaagaacatggagatacatggtttggtgaagctttttaataagtggcaaaacatcgcgtacaagtacgacaaagatctggttctgatgacgcattttataacgaaaaatatcaccgacaaccacggaaaaaacaaaaccacagtacatggctacttctctagtatatttcatgggggagtcgattctctggttgatttaatgaacaaatcattcccagagttgggtataaagaagacagactgtaaggagttctcttggattgacacaactatattctattcaggcgtagtcaactttaacacggcgaatttcaaaaaagagatccttctggacagatccgcaggtaagaaaactgcgttctctatcaaattggactatgtgaagaagcctattcccgaaaccgcgatggtcaagatacttgagaaattatacgaggaagatgtgggagttggaatgtacgtactttatccctatggtgggataatggaagaaatcagcgagagcgccattccatttccccatcgtgccggcatcatgtacgagctgtggtatactgcgagttgggagaagcaagaagacaacgaaaagcacattaactgggtcagatcagtttacaatttcaccaccccatacgtgtcccagaatccgcgtctggcttacttgaactaccgtgatcttgacctgggtaaaacgaacccggagtcacccaacaattacactcaagctagaatctggggagagaaatactttgggaagaacttcaacaggttagtaaaggttaaaaccaaggcagatccaaacaacttttttagaaatgaacaatccattcccccgctacccccgcaccatcaccacgatgaattgtaa

SEQ ID NO: 646 - protein, 552 aa, Artificial Sequence
  Synthetic
MIRSVRRVFIYVSIFVLIIVLKRTLSGTDQTSNPQENFLKCFSEYIPNNPANPKFIYTQHDQLYMSVLNSTIQNLRFTSDTTPKPLVIVTPSNVSHIQASILCSKKVGLQIRTRSGGHDAEGMSYISQVPFVVVDLRNMHSIKIDVHSQTAWVEAGATLGEVYYWINEKNENFSFPGGYCPTVGVGGHFSGGGYGALMRNYGLAADNIIDAHLVNVDGKVLDRKSMGEDLFWAIRGGGGENFGIIAAWKIKLVAVPSKSTIFSVKKNMEIHGLVKLFNKWQNIAYKYDKDLVLMTHFITKNITDNHGKNKTTVHGYFSSIFHGGVDSLVDLMNKSFPELGIKKTDCKEFSWIDTTIFYSGVVNFNTANFKKEILLDRSAGKKTAFSIKLDYVKKPIPETAMVKILEKLYEEDVGVGMYVLYPYGGIMEEISESAIPFPHRAGIMYELWYTASWEKQEDNEKHINWVRSVYNFTTPYVSQNPRLAYLNYRDLDLGKTNPESPNNYTQARIWGEKYFGKNFNRLVKVKTKADPNNFFRNEQSIPPLPPHHHKLD

SEQ ID NO: 647 - DNA, 1659 bp, Artificial Sequence
  Synthetic
atgattagatctgtgagaagggttttcatttacgtctcaatattcgtattgataatagttttgaaaagaacattaagtggcacagatcaaacgtcaaacccgcaagaaaactttctaaaatgcttttctgaatacattcctaacaaccctgccaacccgaagtttatctacacacaacacgatcaattgtatatgagcgtgttgaatagtacaatacagaacctgaggtttacatccgacacaacgccgaaaccgctagtgatcgtcacaccctccaacgtaagccacattcaggcaagcattttatgcagcaagaaagtcggactgcagataaggacgaggtccggaggacacgacgccgaagggatgagctatatctcccaggtaccttttgtggtggtagacttgagaaatatgcactctatcaagatagacgttcactcccaaaccgcttgggttgaggcgggagccacccttggtgaggtctactactggatcaacgaaaagaatgaaaattttagctttcctgggggatattgcccaactgtaggtgttggcggccacttctcaggaggcggttatggggccttgatgcgtaactacggacttgcggccgacaacattatagacgcacatctagtgaatgtagacggcaaagttttagacaggaagagcatgggtgaggatcttttttgggcaattagaggcggagggggagaaaattttggaattatcgctgcttggaaaattaagctagttgcggtaccgagcaaaagcactatattctctgtaaaaaagaacatggagatacatggtttggtgaagctttttaataagtggcaaaacatcgcgtacaagtacgacaaagatctggttctgatgacgcattttataacgaaaaatatcaccgacaaccacggaaaaaacaaaaccacagtacatggctacttctctagtatatttcatgggggagtcgattctctggttgatttaatgaacaaatcattcccagagttgggtataaagaagacagactgtaaggagttctcttggattgacacaactatattctattcaggcgtagtcaactttaacacggcgaatttcaaaaaagagatccttctggacagatccgcaggtaagaaaactgcgttctctatcaaattggactatgtgaagaagcctattcccgaaaccgcgatggtcaagatacttgagaaattatacgaggaagatgtgggagttggaatgtacgtactttatccctatggtgggataatggaagaaatcagcgagagcgccattccatttccccatcgtgccggcatcatgtacgagctgtggtatactgcgagttgggagaagcaagaagacaacgaaaagcacattaactgggtcagatcagtttacaatttcaccaccccatacgtgtcccagaatccgcgtctggcttacttgaactaccgtgatcttgacctgggtaaaacgaacccggagtcacccaacaattacactcaagctagaatctggggagagaaatactttgggaagaacttcaacaggttagtaaaggttaaaaccaaggcagatccaaacaacttttttagaaatgaacaatccattcccccgctacccccgcaccatcacaagctggactaa

SEQ ID NO: 648 - protein, 539 aa, Artificial Sequence
  Synthetic
MIRLTVFLTAVFAAVASCNPQENFLKCFSEYIPNNPANPKFIYTQHDQLYMSVLNSTIQNLRFTSDTTPKPLVIVTPSNVSHIQASILCSKKVGLQIRTRSGGHDAEGMSYISQVPFVVVDLRNMHSIKIDVHSQTAWVEAGATLGEVYYWINEKNENFSFPGGYCPTVGVGGHFSGGGYGALMRNYGLAADNIIDAHLVNVDGKVLDRKSMGEDLFWAIRGGGGENFGIIAAWKIKLVAVPSKSTIFSVKKNMEIHGLVKLFNKWQNIAYKYDKDLVLMTHFITKNITDNHGKNKTTVHGYFSSIFHGGVDSLVDLMNKSFPELGIKKTDCKEFSWIDTTIFYSGVVNFNTANFKKEILLDRSAGKKTAFSIKLDYVKKPIPETAMVKILEKLYEEDVGVGMYVLYPYGGIMEEISESAIPFPHRAGIMYELWYTASWEKQEDNEKHINWVRSVYNFTTPYVSQNPRLAYLNYRDLDLGKTNPESPNNYTQARIWGEKYFGKNFNRLVKVKTKADPNNFFRNEQSIPPLPPHHHHDEL

SEQ ID NO: 649 - DNA, 1620 bp, Artificial Sequence
  Synthetic
atgatcagattgaccgttttcttgaccgctgtttttgctgctgttgcttcttgtaacccgcaagaaaactttctaaaatgcttttctgaatacattcctaacaaccctgccaacccgaagtttatctacacacaacacgatcaattgtatatgagcgtgttgaatagtacaatacagaacctgaggtttacatccgacacaacgccgaaaccgctagtgatcgtcacaccctccaacgtaagccacattcaggcaagcattttatgcagcaagaaagtcggactgcagataaggacgaggtccggaggacacgacgccgaagggatgagctatatctcccaggtaccttttgtggtggtagacttgagaaatatgcactctatcaagatagacgttcactcccaaaccgcttgggttgaggcgggagccacccttggtgaggtctactactggatcaacgaaaagaatgaaaattttagctttcctgggggatattgcccaactgtaggtgttggcggccacttctcaggaggcggttatggggccttgatgcgtaactacggacttgcggccgacaacattatagacgcacatctagtgaatgtagacggcaaagttttagacaggaagagcatgggtgaggatcttttttgggcaattagaggcggagggggagaaaattttggaattatcgctgcttggaaaattaagctagttgcggtaccgagcaaaagcactatattctctgtaaaaaagaacatggagatacatggtttggtgaagctttttaataagtggcaaaacatcgcgtacaagtacgacaaagatctggttctgatgacgcattttataacgaaaaatatcaccgacaaccacggaaaaaacaaaaccacagtacatggctacttctctagtatatttcatgggggagtcgattctctggttgatttaatgaacaaatcattcccagagttgggtataaagaagacagactgtaaggagttctcttggattgacacaactatattctattcaggcgtagtcaactttaacacggcgaatttcaaaaaagagatccttctggacagatccgcaggtaagaaaactgcgttctctatcaaattggactatgtgaagaagcctattcccgaaaccgcgatggtcaagatacttgagaaattatacgaggaagatgtgggagttggaatgtacgtactttatccctatggtgggataatggaagaaatcagcgagagcgccattccatttccccatcgtgccggcatcatgtacgagctgtggtatactgcgagttgggagaagcaagaagacaacgaaaagcacattaactgggtcagatcagtttacaatttcaccaccccatacgtgtcccagaatccgcgtctggcttacttgaactaccgtgatcttgacctgggtaaaacgaacccggagtcacccaacaattacactcaagctagaatctggggagagaaatactttgggaagaacttcaacaggttagtaaaggttaaaaccaaggcagatccaaacaacttttttagaaatgaacaatccattcccccgctacccccgcaccatcaccacgatgaattgtaa

SEQ ID NO: 650 - protein, 538 aa, Artificial Sequence
  Synthetic
MIRLTVFLTAVFAAVASCNPQENFLKCFSEYIPNNPANPKFIYTQHDQLYMSVLNSTIQNLRFTSDTTPKPLVIVTPSNVSHIQASILCSKKVGLQIRTRSGGHDAEGMSYISQVPFVVVDLRNMHSIKIDVHSQTAWVEAGATLGEVYYWINEKNENFSFPGGYCPTVGVGGHFSGGGYGALMRNYGLAADNIIDAHLVNVDGKVLDRKSMGEDLFWAIRGGGGENFGIIAAWKIKLVAVPSKSTIFSVKKNMEIHGLVKLFNKWQNIAYKYDKDLVLMTHFITKNITDNHGKNKTTVHGYFSSIFHGGVDSLVDLMNKSFPELGIKKTDCKEFSWIDTTIFYSGVVNFNTANFKKEILLDRSAGKKTAFSIKLDYVKKPIPETAMVKILEKLYEEDVGVGMYVLYPYGGIMEEISESAIPFPHRAGIMYELWYTASWEKQEDNEKHINWVRSVYNFTTPYVSQNPRLAYLNYRDLDLGKTNPESPNNYTQARIWGEKYFGKNFNRLVKVKTKADPNNFFRNEQSIPPLPPHHHKLD

SEQ ID NO: 651 - DNA, 1617 bp, Artificial Sequence
  Synthetic
atgatcagattgaccgttttcttgaccgctgtttttgctgctgttgcttcttgtaacccgcaagaaaactttctaaaatgcttttctgaatacattcctaacaaccctgccaacccgaagtttatctacacacaacacgatcaattgtatatgagcgtgttgaatagtacaatacagaacctgaggtttacatccgacacaacgccgaaaccgctagtgatcgtcacaccctccaacgtaagccacattcaggcaagcattttatgcagcaagaaagtcggactgcagataaggacgaggtccggaggacacgacgccgaagggatgagctatatctcccaggtaccttttgtggtggtagacttgagaaatatgcactctatcaagatagacgttcactcccaaaccgcttgggttgaggcgggagccacccttggtgaggtctactactggatcaacgaaaagaatgaaaattttagctttcctgggggatattgcccaactgtaggtgttggcggccacttctcaggaggcggttatggggccttgatgcgtaactacggacttgcggccgacaacattatagacgcacatctagtgaatgtagacggcaaagttttagacaggaagagcatgggtgaggatcttttttgggcaattagaggcggagggggagaaaattttggaattatcgctgcttggaaaattaagctagttgcggtaccgagcaaaagcactatattctctgtaaaaaagaacatggagatacatggtttggtgaagctttttaataagtggcaaaacatcgcgtacaagtacgacaaagatctggttctgatgacgcattttataacgaaaaatatcaccgacaaccacggaaaaaacaaaaccacagtacatggctacttctctagtatatttcatgggggagtcgattctctggttgatttaatgaacaaatcattcccagagttgggtataaagaagacagactgtaaggagttctcttggattgacacaactatattctattcaggcgtagtcaactttaacacggcgaatttcaaaaaagagatccttctggacagatccgcaggtaagaaaactgcgttctctatcaaattggactatgtgaagaagcctattcccgaaaccgcgatggtcaagatacttgagaaattatacgaggaagatgtgggagttggaatgtacgtactttatccctatggtgggataatggaagaaatcagcgagagcgccattccatttccccatcgtgccggcatcatgtacgagctgtggtatactgcgagttgggagaagcaagaagacaacgaaaagcacattaactgggtcagatcagtttacaatttcaccaccccatacgtgtcccagaatccgcgtctggcttacttgaactaccgtgatcttgacctgggtaaaacgaacccggagtcacccaacaattacactcaagctagaatctggggagagaaatactttgggaagaacttcaacaggttagtaaaggttaaaaccaaggcagatccaaacaacttttttagaaatgaacaatccattcccccgctacccccgcaccatcacaagctggactaa

SEQ ID NO: 652 - protein, 543 aa, Artificial Sequence
  Synthetic
MRQVWFSWIVGLFLCFFNVSSANPQENFLKCFSEYIPNNPANPKFIYTQHDQLYMSVLNSTIQNLRFTSDTTPKPLVIVTPSNVSHIQASILCSKKVGLQIRTRSGGHDAEGMSYISQVPFVVVDLRNMHSIKIDVHSQTAWVEAGATLGEVYYWINEKNENFSFPGGYCPTVGVGGHFSGGGYGALMRNYGLAADNIIDAHLVNVDGKVLDRKSMGEDLFWAIRGGGGENFGIIAAWKIKLVAVPSKSTIFSVKKNMEIHGLVKLFNKWQNIAYKYDKDLVLMTHFITKNITDNHGKNKTTVHGYFSSIFHGGVDSLVDLMNKSFPELGIKKTDCKEFSWIDTTIFYSGVVNFNTANFKKEILLDRSAGKKTAFSIKLDYVKKPIPETAMVKILEKLYEEDVGVGMYVLYPYGGIMEEISESAIPFPHRAGIMYELWYTASWEKQEDNEKHINWVRSVYNFTTPYVSQNPRLAYLNYRDLDLGKTNPESPNNYTQARIWGEKYFGKNFNRLVKVKTKADPNNFFRNEQSIPPLPPHHHHDEL

SEQ ID NO: 653 - DNA, 1632 bp, Artificial Sequence
  Synthetic
atgaggcaggtttggttctcttggattgtgggattgttcctatgttttttcaacgtgtcttctgctaacccgcaagaaaactttctaaaatgcttttctgaatacattcctaacaaccctgccaacccgaagtttatctacacacaacacgatcaattgtatatgagcgtgttgaatagtacaatacagaacctgaggtttacatccgacacaacgccgaaaccgctagtgatcgtcacaccctccaacgtaagccacattcaggcaagcattttatgcagcaagaaagtcggactgcagataaggacgaggtccggaggacacgacgccgaagggatgagctatatctcccaggtaccttttgtggtggtagacttgagaaatatgcactctatcaagatagacgttcactcccaaaccgcttgggttgaggcgggagccacccttggtgaggtctactactggatcaacgaaaagaatgaaaattttagctttcctgggggatattgcccaactgtaggtgttggcggccacttctcaggaggcggttatggggccttgatgcgtaactacggacttgcggccgacaacattatagacgcacatctagtgaatgtagacggcaaagttttagacaggaagagcatgggtgaggatcttttttgggcaattagaggcggagggggagaaaattttggaattatcgctgcttggaaaattaagctagttgcggtaccgagcaaaagcactatattctctgtaaaaaagaacatggagatacatggtttggtgaagctttttaataagtggcaaaacatcgcgtacaagtacgacaaagatctggttctgatgacgcattttataacgaaaaatatcaccgacaaccacggaaaaaacaaaaccacagtacatggctacttctctagtatatttcatgggggagtcgattctctggttgatttaatgaacaaatcattcccagagttgggtataaagaagacagactgtaaggagttctcttggattgacacaactatattctattcaggcgtagtcaactttaacacggcgaatttcaaaaaagagatccttctggacagatccgcaggtaagaaaactgcgttctctatcaaattggactatgtgaagaagcctattcccgaaaccgcgatggtcaagatacttgagaaattatacgaggaagatgtgggagttggaatgtacgtactttatccctatggtgggataatggaagaaatcagcgagagcgccattccatttccccatcgtgccggcatcatgtacgagctgtggtatactgcgagttgggagaagcaagaagacaacgaaaagcacattaactgggtcagatcagtttacaatttcaccaccccatacgtgtcccagaatccgcgtctggcttacttgaactaccgtgatcttgacctgggtaaaacgaacccggagtcacccaacaattacactcaagctagaatctggggagagaaatactttgggaagaacttcaacaggttagtaaaggttaaaaccaaggcagatccaaacaacttttttagaaatgaacaatccattcccccgctacccccgcaccatcaccacgatgaattgtaa

SEQ ID NO: 654 - protein, 542 aa, Artificial Sequence
  Synthetic
MRQVWFSWIVGLFLCFFNVSSANPQENFLKCFSEYIPNNPANPKFIYTQHDQLYMSVLNSTIQNLRFTSDTTPKPLVIVTPSNVSHIQASILCSKKVGLQIRTRSGGHDAEGMSYISQVPFVVVDLRNMHSIKIDVHSQTAWVEAGATLGEVYYWINEKNENFSFPGGYCPTVGVGGHFSGGGYGALMRNYGLAADNIIDAHLVNVDGKVLDRKSMGEDLFWAIRGGGGENFGIIAAWKIKLVAVPSKSTIFSVKKNMEIHGLVKLFNKWQNIAYKYDKDLVLMTHFITKNITDNHGKNKTTVHGYFSSIFHGGVDSLVDLMNKSFPELGIKKTDCKEFSWIDTTIFYSGVVNFNTANFKKEILLDRSAGKKTAFSIKLDYVKKPIPETAMVKILEKLYEEDVGVGMYVLYPYGGIMEEISESAIPFPHRAGIMYELWYTASWEKQEDNEKHINWVRSVYNFTTPYVSQNPRLAYLNYRDLDLGKTNPESPNNYTQARIWGEKYFGKNFNRLVKVKTKADPNNFFRNEQSIPPLPPHHHKLD

SEQ ID NO: 655 - DNA, 1629 bp, Artificial Sequence
  Synthetic
atgaggcaggtttggttctcttggattgtgggattgttcctatgttttttcaacgtgtcttctgctaacccgcaagaaaactttctaaaatgcttttctgaatacattcctaacaaccctgccaacccgaagtttatctacacacaacacgatcaattgtatatgagcgtgttgaatagtacaatacagaacctgaggtttacatccgacacaacgccgaaaccgctagtgatcgtcacaccctccaacgtaagccacattcaggcaagcattttatgcagcaagaaagtcggactgcagataaggacgaggtccggaggacacgacgccgaagggatgagctatatctcccaggtaccttttgtggtggtagacttgagaaatatgcactctatcaagatagacgttcactcccaaaccgcttgggttgaggcgggagccacccttggtgaggtctactactggatcaacgaaaagaatgaaaattttagctttcctgggggatattgcccaactgtaggtgttggcggccacttctcaggaggcggttatggggccttgatgcgtaactacggacttgcggccgacaacattatagacgcacatctagtgaatgtagacggcaaagttttagacaggaagagcatgggtgaggatcttttttgggcaattagaggcggagggggagaaaattttggaattatcgctgcttggaaaattaagctagttgcggtaccgagcaaaagcactatattctctgtaaaaaagaacatggagatacatggtttggtgaagctttttaataagtggcaaaacatcgcgtacaagtacgacaaagatctggttctgatgacgcattttataacgaaaaatatcaccgacaaccacggaaaaaacaaaaccacagtacatggctacttctctagtatatttcatgggggagtcgattctctggttgatttaatgaacaaatcattcccagagttgggtataaagaagacagactgtaaggagttctcttggattgacacaactatattctattcaggcgtagtcaactttaacacggcgaatttcaaaaaagagatccttctggacagatccgcaggtaagaaaactgcgttctctatcaaattggactatgtgaagaagcctattcccgaaaccgcgatggtcaagatacttgagaaattatacgaggaagatgtgggagttggaatgtacgtactttatccctatggtgggataatggaagaaatcagcgagagcgccattccatttccccatcgtgccggcatcatgtacgagctgtggtatactgcgagttgggagaagcaagaagacaacgaaaagcacattaactgggtcagatcagtttacaatttcaccaccccatacgtgtcccagaatccgcgtctggcttacttgaactaccgtgatcttgacctgggtaaaacgaacccggagtcacccaacaattacactcaagctagaatctggggagagaaatactttgggaagaacttcaacaggttagtaaaggttaaaaccaaggcagatccaaacaacttttttagaaatgaacaatccattcccccgctacccccgcaccatcacaagctggactaa

SEQ ID NO: 656 - protein, 536 aa, Artificial Sequence
  Synthetic
MNPQENFLKCFSEYIPNNPANPKFIYTQHDQLYMSVLNSTIQNLRFTSDTTPKPLVIVTPSNVSHIQASILCSKKVGLQIRTRSGGHDAEGMSYISQVPFVVVDLRNMHSIKIDVHSQTAWVEAGATLGEVYYWINEKNENFSFPGGYCPTVGVGGHFSGGGYGALMRNYGLAADNIIDAHLVNVDGKVLDRKSMGEDLFWAIRGGGGENFGIIAAWKIKLVAVPSKSTIFSVKKNMEIHGLVKLFNKWQNIAYKYDKDLVLMTHFITKNITDNHGKNKTTVHGYFSSIFHGGVDSLVDLMNKSFPELGIKKTDCKEFSWIDTTIFYSGVVNFNTANFKKEILLDRSAGKKTAFSIKLDYVKKPIPETAMVKILEKLYEEDVGVGMYVLYPYGGIMEEISESAIPFPHRAGIMYELWYTASWEKQEDNEKHINWVRSVYNFTTPYVSQNPRLAYLNYRDLDLGKTNPESPNNYTQARIWGEKYFGKNFNRLVKVKTKADPNNFFRNEQSIPPLPPHHHMVYIGIAIFLFLVGLFMK

SEQ ID NO: 657 - DNA, 1611 bp, Artificial Sequence
  Synthetic
atgaacccgcaagaaaactttctaaaatgcttttctgaatacattcctaacaaccctgccaacccgaagtttatctacacacaacacgatcaattgtatatgagcgtgttgaatagtacaatacagaacctgaggtttacatccgacacaacgccgaaaccgctagtgatcgtcacaccctccaacgtaagccacattcaggcaagcattttatgcagcaagaaagtcggactgcagataaggacgaggtccggaggacacgacgccgaagggatgagctatatctcccaggtaccttttgtggtggtagacttgagaaatatgcactctatcaagatagacgttcactcccaaaccgcttgggttgaggcgggagccacccttggtgaggtctactactggatcaacgaaaagaatgaaaattttagctttcctgggggatattgcccaactgtaggtgttggcggccacttctcaggaggcggttatggggccttgatgcgtaactacggacttgcggccgacaacattatagacgcacatctagtgaatgtagacggcaaagttttagacaggaagagcatgggtgaggatcttttttgggcaattagaggcggagggggagaaaattttggaattatcgctgcttggaaaattaagctagttgcggtaccgagcaaaagcactatattctctgtaaaaaagaacatggagatacatggtttggtgaagctttttaataagtggcaaaacatcgcgtacaagtacgacaaagatctggttctgatgacgcattttataacgaaaaatatcaccgacaaccacggaaaaaacaaaaccacagtacatggctacttctctagtatatttcatgggggagtcgattctctggttgatttaatgaacaaatcattcccagagttgggtataaagaagacagactgtaaggagttctcttggattgacacaactatattctattcaggcgtagtcaactttaacacggcgaatttcaaaaaagagatccttctggacagatccgcaggtaagaaaactgcgttctctatcaaattggactatgtgaagaagcctattcccgaaaccgcgatggtcaagatacttgagaaattatacgaggaagatgtgggagttggaatgtacgtactttatccctatggtgggataatggaagaaatcagcgagagcgccattccatttccccatcgtgccggcatcatgtacgagctgtggtatactgcgagttgggagaagcaagaagacaacgaaaagcacattaactgggtcagatcagtttacaatttcaccaccccatacgtgtcccagaatccgcgtctggcttacttgaactaccgtgatcttgacctgggtaaaacgaacccggagtcacccaacaattacactcaagctagaatctggggagagaaatactttgggaagaacttcaacaggttagtaaaggttaaaaccaaggcagatccaaacaacttttttagaaatgaacaatccattcccccgctacccccgcaccatcacatggtttatattggtatcgctatttttttgtttttggttggcctttttatgaaataa

SEQ ID NO: 658 - protein, 521 aa, Artificial Sequence
  Synthetic
MNPQENFLKCFSEYIPNNPANPKFIYTQHDQLYMSVLNSTIQNLRFTSDTTPKPLVIVTPSNVSHIQASILCSKKVGLQIRTRSGGHDAEGMSYISQVPFVVVDLRNMHSIKIDVHSQTAWVEAGATLGEVYYWINEKNENFSFPGGYCPTVGVGGHFSGGGYGALMRNYGLAADNIIDAHLVNVDGKVLDRKSMGEDLFWAIRGGGGENFGIIAAWKIKLVAVPSKSTIFSVKKNMEIHGLVKLFNKWQNIAYKYDKDLVLMTHFITKNITDNHGKNKTTVHGYFSSIFHGGVDSLVDLMNKSFPELGIKKTDCKEFSWIDTTIFYSGVVNFNTANFKKEILLDRSAGKKTAFSIKLDYVKKPIPETAMVKILEKLYEEDVGVGMYVLYPYGGIMEEISESAIPFPHRAGIMYELWYTASWEKQEDNEKHINWVRSVYNFTTPYVSQNPRLAYLNYRDLDLGKTNPESPNNYTQARIWGEKYFGKNFNRLVKVKTKADPNNFFRNEQSIPPLPPHHHSKL

SEQ ID NO: 659 - DNA, 1566 bp, Artificial Sequence
  Synthetic
atgaacccgcaagaaaactttctaaaatgcttttctgaatacattcctaacaaccctgccaacccgaagtttatctacacacaacacgatcaattgtatatgagcgtgttgaatagtacaatacagaacctgaggtttacatccgacacaacgccgaaaccgctagtgatcgtcacaccctccaacgtaagccacattcaggcaagcattttatgcagcaagaaagtcggactgcagataaggacgaggtccggaggacacgacgccgaagggatgagctatatctcccaggtaccttttgtggtggtagacttgagaaatatgcactctatcaagatagacgttcactcccaaaccgcttgggttgaggcgggagccacccttggtgaggtctactactggatcaacgaaaagaatgaaaattttagctttcctgggggatattgcccaactgtaggtgttggcggccacttctcaggaggcggttatggggccttgatgcgtaactacggacttgcggccgacaacattatagacgcacatctagtgaatgtagacggcaaagttttagacaggaagagcatgggtgaggatcttttttgggcaattagaggcggagggggagaaaattttggaattatcgctgcttggaaaattaagctagttgcggtaccgagcaaaagcactatattctctgtaaaaaagaacatggagatacatggtttggtgaagctttttaataagtggcaaaacatcgcgtacaagtacgacaaagatctggttctgatgacgcattttataacgaaaaatatcaccgacaaccacggaaaaaacaaaaccacagtacatggctacttctctagtatatttcatgggggagtcgattctctggttgatttaatgaacaaatcattcccagagttgggtataaagaagacagactgtaaggagttctcttggattgacacaactatattctattcaggcgtagtcaactttaacacggcgaatttcaaaaaagagatccttctggacagatccgcaggtaagaaaactgcgttctctatcaaattggactatgtgaagaagcctattcccgaaaccgcgatggtcaagatacttgagaaattatacgaggaagatgtgggagttggaatgtacgtactttatccctatggtgggataatggaagaaatcagcgagagcgccattccatttccccatcgtgccggcatcatgtacgagctgtggtatactgcgagttgggagaagcaagaagacaacgaaaagcacattaactgggtcagatcagtttacaatttcaccaccccatacgtgtcccagaatccgcgtctggcttacttgaactaccgtgatcttgacctgggtaaaacgaacccggagtcacccaacaattacactcaagctagaatctggggagagaaatactttgggaagaacttcaacaggttagtaaaggttaaaaccaaggcagatccaaacaacttttttagaaatgaacaatccattcccccgctacccccgcaccatcacagcaaactataa

SEQ ID NO: 660 - protein, 522 aa, Artificial Sequence
  Synthetic
MNPQENFLKCFSEYIPNNPANPKFIYTQHDQLYMSVLNSTIQNLRFTSDTTPKPLVIVTPSNVSHIQASILCSKKVGLQIRTRSGGHDAEGMSYISQVPFVVVDLRNMHSIKIDVHSQTAWVEAGATLGEVYYWINEKNENFSFPGGYCPTVGVGGHFSGGGYGALMRNYGLAADNIIDAHLVNVDGKVLDRKSMGEDLFWAIRGGGGENFGIIAAWKIKLVAVPSKSTIFSVKKNMEIHGLVKLFNKWQNIAYKYDKDLVLMTHFITKNITDNHGKNKTTVHGYFSSIFHGGVDSLVDLMNKSFPELGIKKTDCKEFSWIDTTIFYSGVVNFNTANFKKEILLDRSAGKKTAFSIKLDYVKKPIPETAMVKILEKLYEEDVGVGMYVLYPYGGIMEEISESAIPFPHRAGIMYELWYTASWEKQEDNEKHINWVRSVYNFTTPYVSQNPRLAYLNYRDLDLGKTNPESPNNYTQARIWGEKYFGKNFNRLVKVKTKADPNNFFRNEQSIPPLPPHHHCVIA

SEQ ID NO: 661 - DNA, 1569 bp, Artificial Sequence
  Synthetic
atgaacccgcaagaaaactttctaaaatgcttttctgaatacattcctaacaaccctgccaacccgaagtttatctacacacaacacgatcaattgtatatgagcgtgttgaatagtacaatacagaacctgaggtttacatccgacacaacgccgaaaccgctagtgatcgtcacaccctccaacgtaagccacattcaggcaagcattttatgcagcaagaaagtcggactgcagataaggacgaggtccggaggacacgacgccgaagggatgagctatatctcccaggtaccttttgtggtggtagacttgagaaatatgcactctatcaagatagacgttcactcccaaaccgcttgggttgaggcgggagccacccttggtgaggtctactactggatcaacgaaaagaatgaaaattttagctttcctgggggatattgcccaactgtaggtgttggcggccacttctcaggaggcggttatggggccttgatgcgtaactacggacttgcggccgacaacattatagacgcacatctagtgaatgtagacggcaaagttttagacaggaagagcatgggtgaggatcttttttgggcaattagaggcggagggggagaaaattttggaattatcgctgcttggaaaattaagctagttgcggtaccgagcaaaagcactatattctctgtaaaaaagaacatggagatacatggtttggtgaagctttttaataagtggcaaaacatcgcgtacaagtacgacaaagatctggttctgatgacgcattttataacgaaaaatatcaccgacaaccacggaaaaaacaaaaccacagtacatggctacttctctagtatatttcatgggggagtcgattctctggttgatttaatgaacaaatcattcccagagttgggtataaagaagacagactgtaaggagttctcttggattgacacaactatattctattcaggcgtagtcaactttaacacggcgaatttcaaaaaagagatccttctggacagatccgcaggtaagaaaactgcgttctctatcaaattggactatgtgaagaagcctattcccgaaaccgcgatggtcaagatacttgagaaattatacgaggaagatgtgggagttggaatgtacgtactttatccctatggtgggataatggaagaaatcagcgagagcgccattccatttccccatcgtgccggcatcatgtacgagctgtggtatactgcgagttgggagaagcaagaagacaacgaaaagcacattaactgggtcagatcagtttacaatttcaccaccccatacgtgtcccagaatccgcgtctggcttacttgaactaccgtgatcttgacctgggtaaaacgaacccggagtcacccaacaattacactcaagctagaatctggggagagaaatactttgggaagaacttcaacaggttagtaaaggttaaaaccaaggcagatccaaacaacttttttagaaatgaacaatccattcccccgctacccccgcaccatcactgtgttattgcttaa

SEQ ID NO: 662 - protein, 537 aa, Artificial Sequence
  Synthetic
MLSKVLLNIAFKVLLTTAKRNPQENFLKCFSEYIPNNPANPKFIYTQHDQLYMSVLNSTIQNLRFTSDTTPKPLVIVTPSNVSHIQASILCSKKVGLQIRTRSGGHDAEGMSYISQVPFVVVDLRNMHSIKIDVHSQTAWVEAGATLGEVYYWINEKNENFSFPGGYCPTVGVGGHFSGGGYGALMRNYGLAADNIIDAHLVNVDGKVLDRKSMGEDLFWAIRGGGGENFGIIAAWKIKLVAVPSKSTIFSVKKNMEIHGLVKLFNKWQNIAYKYDKDLVLMTHFITKNITDNHGKNKTTVHGYFSSIFHGGVDSLVDLMNKSFPELGIKKTDCKEFSWIDTTIFYSGVVNFNTANFKKEILLDRSAGKKTAFSIKLDYVKKPIPETAMVKILEKLYEEDVGVGMYVLYPYGGIMEEISESAIPFPHRAGIMYELWYTASWEKQEDNEKHINWVRSVYNFTTPYVSQNPRLAYLNYRDLDLGKTNPESPNNYTQARIWGEKYFGKNFNRLVKVKTKADPNNFFRNEQSIPPLPPHHH

SEQ ID NO: 663 - DNA, 1614 bp, Artificial Sequence
  Synthetic
atgctatccaaggtattgctgaatatagctttcaaggtgctgttaaccaccgccaagagaaacccgcaagaaaactttctaaaatgcttttctgaatacattcctaacaaccctgccaacccgaagtttatctacacacaacacgatcaattgtatatgagcgtgttgaatagtacaatacagaacctgaggtttacatccgacacaacgccgaaaccgctagtgatcgtcacaccctccaacgtaagccacattcaggcaagcattttatgcagcaagaaagtcggactgcagataaggacgaggtccggaggacacgacgccgaagggatgagctatatctcccaggtaccttttgtggtggtagacttgagaaatatgcactctatcaagatagacgttcactcccaaaccgcttgggttgaggcgggagccacccttggtgaggtctactactggatcaacgaaaagaatgaaaattttagctttcctgggggatattgcccaactgtaggtgttggcggccacttctcaggaggcggttatggggccttgatgcgtaactacggacttgcggccgacaacattatagacgcacatctagtgaatgtagacggcaaagttttagacaggaagagcatgggtgaggatcttttttgggcaattagaggcggagggggagaaaattttggaattatcgctgcttggaaaattaagctagttgcggtaccgagcaaaagcactatattctctgtaaaaaagaacatggagatacatggtttggtgaagctttttaataagtggcaaaacatcgcgtacaagtacgacaaagatctggttctgatgacgcattttataacgaaaaatatcaccgacaaccacggaaaaaacaaaaccacagtacatggctacttctctagtatatttcatgggggagtcgattctctggttgatttaatgaacaaatcattcccagagttgggtataaagaagacagactgtaaggagttctcttggattgacacaactatattctattcaggcgtagtcaactttaacacggcgaatttcaaaaaagagatccttctggacagatccgcaggtaagaaaactgcgttctctatcaaattggactatgtgaagaagcctattcccgaaaccgcgatggtcaagatacttgagaaattatacgaggaagatgtgggagttggaatgtacgtactttatccctatggtgggataatggaagaaatcagcgagagcgccattccatttccccatcgtgccggcatcatgtacgagctgtggtatactgcgagttgggagaagcaagaagacaacgaaaagcacattaactgggtcagatcagtttacaatttcaccaccccatacgtgtcccagaatccgcgtctggcttacttgaactaccgtgatcttgacctgggtaaaacgaacccggagtcacccaacaattacactcaagctagaatctggggagagaaatactttgggaagaacttcaacaggttagtaaaggttaaaaccaaggcagatccaaacaacttttttagaaatgaacaatccattcccccgctacccccgcaccatcactaa

SEQ ID NO: 664 - protein, 541 aa, Artificial Sequence
  Synthetic
MKSFITRNKTAILATVAATGTAIGNPQENFLKCFSEYIPNNPANPKFIYTQHDQLYMSVLNSTIQNLRFTSDTTPKPLVIVTPSNVSHIQASILCSKKVGLQIRTRSGGHDAEGMSYISQVPFVVVDLRNMHSIKIDVHSQTAWVEAGATLGEVYYWINEKNENFSFPGGYCPTVGVGGHFSGGGYGALMRNYGLAADNIIDAHLVNVDGKVLDRKSMGEDLFWAIRGGGGENFGIIAAWKIKLVAVPSKSTIFSVKKNMEIHGLVKLFNKWQNIAYKYDKDLVLMTHFITKNITDNHGKNKTTVHGYFSSIFHGGVDSLVDLMNKSFPELGIKKTDCKEFSWIDTTIFYSGVVNFNTANFKKEILLDRSAGKKTAFSIKLDYVKKPIPETAMVKILEKLYEEDVGVGMYVLYPYGGIMEEISESAIPFPHRAGIMYELWYTASWEKQEDNEKHINWVRSVYNFTTPYVSQNPRLAYLNYRDLDLGKTNPESPNNYTQARIWGEKYFGKNFNRLVKVKTKADPNNFFRNEQSIPPLPPHHH

SEQ ID NO: 665 - DNA, 1626 bp, Artificial Sequence
  Synthetic
atgaagagcttcattacaaggaacaagacagccattttggcaaccgttgctgctacaggtactgccatcggtaacccgcaagaaaactttctaaaatgcttttctgaatacattcctaacaaccctgccaacccgaagtttatctacacacaacacgatcaattgtatatgagcgtgttgaatagtacaatacagaacctgaggtttacatccgacacaacgccgaaaccgctagtgatcgtcacaccctccaacgtaagccacattcaggcaagcattttatgcagcaagaaagtcggactgcagataaggacgaggtccggaggacacgacgccgaagggatgagctatatctcccaggtaccttttgtggtggtagacttgagaaatatgcactctatcaagatagacgttcactcccaaaccgcttgggttgaggcgggagccacccttggtgaggtctactactggatcaacgaaaagaatgaaaattttagctttcctgggggatattgcccaactgtaggtgttggcggccacttctcaggaggcggttatggggccttgatgcgtaactacggacttgcggccgacaacattatagacgcacatctagtgaatgtagacggcaaagttttagacaggaagagcatgggtgaggatcttttttgggcaattagaggcggagggggagaaaattttggaattatcgctgcttggaaaattaagctagttgcggtaccgagcaaaagcactatattctctgtaaaaaagaacatggagatacatggtttggtgaagctttttaataagtggcaaaacatcgcgtacaagtacgacaaagatctggttctgatgacgcattttataacgaaaaatatcaccgacaaccacggaaaaaacaaaaccacagtacatggctacttctctagtatatttcatgggggagtcgattctctggttgatttaatgaacaaatcattcccagagttgggtataaagaagacagactgtaaggagttctcttggattgacacaactatattctattcaggcgtagtcaactttaacacggcgaatttcaaaaaagagatccttctggacagatccgcaggtaagaaaactgcgttctctatcaaattggactatgtgaagaagcctattcccgaaaccgcgatggtcaagatacttgagaaattatacgaggaagatgtgggagttggaatgtacgtactttatccctatggtgggataatggaagaaatcagcgagagcgccattccatttccccatcgtgccggcatcatgtacgagctgtggtatactgcgagttgggagaagcaagaagacaacgaaaagcacattaactgggtcagatcagtttacaatttcaccaccccatacgtgtcccagaatccgcgtctggcttacttgaactaccgtgatcttgacctgggtaaaacgaacccggagtcacccaacaattacactcaagctagaatctggggagagaaatactttgggaagaacttcaacaggttagtaaaggttaaaaccaaggcagatccaaacaacttttttagaaatgaacaatccattcccccgctacccccgcaccatcactaa

SEQ ID NO: 666 - protein, 538 aa, Artificial Sequence
  Synthetic
MKLKTVRSAVLSSLFASQVLGNPQENFLKCFSEYIPNNPANPKFIYTQHDQLYMSVLNSTIQNLRFTSDTTPKPLVIVTPSNVSHIQASILCSKKVGLQIRTRSGGHDAEGMSYISQVPFVVVDLRNMHSIKIDVHSQTAWVEAGATLGEVYYWINEKNENFSFPGGYCPTVGVGGHFSGGGYGALMRNYGLAADNIIDAHLVNVDGKVLDRKSMGEDLFWAIRGGGGENFGIIAAWKIKLVAVPSKSTIFSVKKNMEIHGLVKLFNKWQNIAYKYDKDLVLMTHFITKNITDNHGKNKTTVHGYFSSIFHGGVDSLVDLMNKSFPELGIKKTDCKEFSWIDTTIFYSGVVNFNTANFKKEILLDRSAGKKTAFSIKLDYVKKPIPETAMVKILEKLYEEDVGVGMYVLYPYGGIMEEISESAIPFPHRAGIMYELWYTASWEKQEDNEKHINWVRSVYNFTTPYVSQNPRLAYLNYRDLDLGKTNPESPNNYTQARIWGEKYFGKNFNRLVKVKTKADPNNFFRNEQSIPPLPPHHH

SEQ ID NO: 667 - DNA, 1617 bp, Artificial Sequence
  Synthetic
atgaaactgaaaactgtaagatctgcggtcctttcgtcactctttgcatcgcaggttctcggtaacccgcaagaaaactttctaaaatgcttttctgaatacattcctaacaaccctgccaacccgaagtttatctacacacaacacgatcaattgtatatgagcgtgttgaatagtacaatacagaacctgaggtttacatccgacacaacgccgaaaccgctagtgatcgtcacaccctccaacgtaagccacattcaggcaagcattttatgcagcaagaaagtcggactgcagataaggacgaggtccggaggacacgacgccgaagggatgagctatatctcccaggtaccttttgtggtggtagacttgagaaatatgcactctatcaagatagacgttcactcccaaaccgcttgggttgaggcgggagccacccttggtgaggtctactactggatcaacgaaaagaatgaaaattttagctttcctgggggatattgcccaactgtaggtgttggcggccacttctcaggaggcggttatggggccttgatgcgtaactacggacttgcggccgacaacattatagacgcacatctagtgaatgtagacggcaaagttttagacaggaagagcatgggtgaggatcttttttgggcaattagaggcggagggggagaaaattttggaattatcgctgcttggaaaattaagctagttgcggtaccgagcaaaagcactatattctctgtaaaaaagaacatggagatacatggtttggtgaagctttttaataagtggcaaaacatcgcgtacaagtacgacaaagatctggttctgatgacgcattttataacgaaaaatatcaccgacaaccacggaaaaaacaaaaccacagtacatggctacttctctagtatatttcatgggggagtcgattctctggttgatttaatgaacaaatcattcccagagttgggtataaagaagacagactgtaaggagttctcttggattgacacaactatattctattcaggcgtagtcaactttaacacggcgaatttcaaaaaagagatccttctggacagatccgcaggtaagaaaactgcgttctctatcaaattggactatgtgaagaagcctattcccgaaaccgcgatggtcaagatacttgagaaattatacgaggaagatgtgggagttggaatgtacgtactttatccctatggtgggataatggaagaaatcagcgagagcgccattccatttccccatcgtgccggcatcatgtacgagctgtggtatactgcgagttgggagaagcaagaagacaacgaaaagcacattaactgggtcagatcagtttacaatttcaccaccccatacgtgtcccagaatccgcgtctggcttacttgaactaccgtgatcttgacctgggtaaaacgaacccggagtcacccaacaattacactcaagctagaatctggggagagaaatactttgggaagaacttcaacaggttagtaaaggttaaaaccaaggcagatccaaacaacttttttagaaatgaacaatccattcccccgctacccccgcaccatcactaa

SEQ ID NO: 668 - protein, 536 aa, Artificial Sequence
  Synthetic
MKFISTFLTFILAAVSVTANPQENFLKCFSEYIPNNPANPKFIYTQHDQLYMSVLNSTIQNLRFTSDTTPKPLVIVTPSNVSHIQASILCSKKVGLQIRTRSGGHDAEGMSYISQVPFVVVDLRNMHSIKIDVHSQTAWVEAGATLGEVYYWINEKNENFSFPGGYCPTVGVGGHFSGGGYGALMRNYGLAADNIIDAHLVNVDGKVLDRKSMGEDLFWAIRGGGGENFGIIAAWKIKLVAVPSKSTIFSVKKNMEIHGLVKLFNKWQNIAYKYDKDLVLMTHFITKNITDNHGKNKTTVHGYFSSIFHGGVDSLVDLMNKSFPELGIKKTDCKEFSWIDTTIFYSGVVNFNTANFKKEILLDRSAGKKTAFSIKLDYVKKPIPETAMVKILEKLYEEDVGVGMYVLYPYGGIMEEISESAIPFPHRAGIMYELWYTASWEKQEDNEKHINWVRSVYNFTTPYVSQNPRLAYLNYRDLDLGKTNPESPNNYTQARIWGEKYFGKNFNRLVKVKTKADPNNFFRNEQSIPPLPPHHH

SEQ ID NO: 669 - DNA, 1611 bp, Artificial Sequence
  Synthetic
atgaaattcatttctacctttctcacttttattttagcggccgtttctgtcactgctaacccgcaagaaaactttctaaaatgcttttctgaatacattcctaacaaccctgccaacccgaagtttatctacacacaacacgatcaattgtatatgagcgtgttgaatagtacaatacagaacctgaggtttacatccgacacaacgccgaaaccgctagtgatcgtcacaccctccaacgtaagccacattcaggcaagcattttatgcagcaagaaagtcggactgcagataaggacgaggtccggaggacacgacgccgaagggatgagctatatctcccaggtaccttttgtggtggtagacttgagaaatatgcactctatcaagatagacgttcactcccaaaccgcttgggttgaggcgggagccacccttggtgaggtctactactggatcaacgaaaagaatgaaaattttagctttcctgggggatattgcccaactgtaggtgttggcggccacttctcaggaggcggttatggggccttgatgcgtaactacggacttgcggccgacaacattatagacgcacatctagtgaatgtagacggcaaagttttagacaggaagagcatgggtgaggatcttttttgggcaattagaggcggagggggagaaaattttggaattatcgctgcttggaaaattaagctagttgcggtaccgagcaaaagcactatattctctgtaaaaaagaacatggagatacatggtttggtgaagctttttaataagtggcaaaacatcgcgtacaagtacgacaaagatctggttctgatgacgcattttataacgaaaaatatcaccgacaaccacggaaaaaacaaaaccacagtacatggctacttctctagtatatttcatgggggagtcgattctctggttgatttaatgaacaaatcattcccagagttgggtataaagaagacagactgtaaggagttctcttggattgacacaactatattctattcaggcgtagtcaactttaacacggcgaatttcaaaaaagagatccttctggacagatccgcaggtaagaaaactgcgttctctatcaaattggactatgtgaagaagcctattcccgaaaccgcgatggtcaagatacttgagaaattatacgaggaagatgtgggagttggaatgtacgtactttatccctatggtgggataatggaagaaatcagcgagagcgccattccatttccccatcgtgccggcatcatgtacgagctgtggtatactgcgagttgggagaagcaagaagacaacgaaaagcacattaactgggtcagatcagtttacaatttcaccaccccatacgtgtcccagaatccgcgtctggcttacttgaactaccgtgatcttgacctgggtaaaacgaacccggagtcacccaacaattacactcaagctagaatctggggagagaaatactttgggaagaacttcaacaggttagtaaaggttaaaaccaaggcagatccaaacaacttttttagaaatgaacaatccattcccccgctacccccgcaccatcactaa

SEQ ID NO: 670 - protein, 539 aa, Artificial Sequence
  Synthetic
MRQVWFSWIVGLFLCFFNVSSANPQENFLKCFSEYIPNNPANPKFIYTQHDQLYMSVLNSTIQNLRFTSDTTPKPLVIVTPSNVSHIQASILCSKKVGLQIRTRSGGHDAEGMSYISQVPFVVVDLRNMHSIKIDVHSQTAWVEAGATLGEVYYWINEKNENFSFPGGYCPTVGVGGHFSGGGYGALMRNYGLAADNIIDAHLVNVDGKVLDRKSMGEDLFWAIRGGGGENFGIIAAWKIKLVAVPSKSTIFSVKKNMEIHGLVKLFNKWQNIAYKYDKDLVLMTHFITKNITDNHGKNKTTVHGYFSSIFHGGVDSLVDLMNKSFPELGIKKTDCKEFSWIDTTIFYSGVVNFNTANFKKEILLDRSAGKKTAFSIKLDYVKKPIPETAMVKILEKLYEEDVGVGMYVLYPYGGIMEEISESAIPFPHRAGIMYELWYTASWEKQEDNEKHINWVRSVYNFTTPYVSQNPRLAYLNYRDLDLGKTNPESPNNYTQARIWGEKYFGKNFNRLVKVKTKADPNNFFRNEQSIPPLPPHHH

SEQ ID NO: 671 - DNA, 1620 bp, Artificial Sequence
  Synthetic
atgaggcaggtttggttctcttggattgtgggattgttcctatgttttttcaacgtgtcttctgctaacccgcaagaaaactttctaaaatgcttttctgaatacattcctaacaaccctgccaacccgaagtttatctacacacaacacgatcaattgtatatgagcgtgttgaatagtacaatacagaacctgaggtttacatccgacacaacgccgaaaccgctagtgatcgtcacaccctccaacgtaagccacattcaggcaagcattttatgcagcaagaaagtcggactgcagataaggacgaggtccggaggacacgacgccgaagggatgagctatatctcccaggtaccttttgtggtggtagacttgagaaatatgcactctatcaagatagacgttcactcccaaaccgcttgggttgaggcgggagccacccttggtgaggtctactactggatcaacgaaaagaatgaaaattttagctttcctgggggatattgcccaactgtaggtgttggcggccacttctcaggaggcggttatggggccttgatgcgtaactacggacttgcggccgacaacattatagacgcacatctagtgaatgtagacggcaaagttttagacaggaagagcatgggtgaggatcttttttgggcaattagaggcggagggggagaaaattttggaattatcgctgcttggaaaattaagctagttgcggtaccgagcaaaagcactatattctctgtaaaaaagaacatggagatacatggtttggtgaagctttttaataagtggcaaaacatcgcgtacaagtacgacaaagatctggttctgatgacgcattttataacgaaaaatatcaccgacaaccacggaaaaaacaaaaccacagtacatggctacttctctagtatatttcatgggggagtcgattctctggttgatttaatgaacaaatcattcccagagttgggtataaagaagacagactgtaaggagttctcttggattgacacaactatattctattcaggcgtagtcaactttaacacggcgaatttcaaaaaagagatccttctggacagatccgcaggtaagaaaactgcgttctctatcaaattggactatgtgaagaagcctattcccgaaaccgcgatggtcaagatacttgagaaattatacgaggaagatgtgggagttggaatgtacgtactttatccctatggtgggataatggaagaaatcagcgagagcgccattccatttccccatcgtgccggcatcatgtacgagctgtggtatactgcgagttgggagaagcaagaagacaacgaaaagcacattaactgggtcagatcagtttacaatttcaccaccccatacgtgtcccagaatccgcgtctggcttacttgaactaccgtgatcttgacctgggtaaaacgaacccggagtcacccaacaattacactcaagctagaatctggggagagaaatactttgggaagaacttcaacaggttagtaaaggttaaaaccaaggcagatccaaacaacttttttagaaatgaacaatccattcccccgctacccccgcaccatcactaa

SEQ ID NO: 672 - protein, 1052 aa, Artificial Sequence
  Synthetic
MIRLTVFLTAVFAAVASCNPQENFLKCFSEYIPNNPANPKFIYTQHDQLYMSVLNSTIQNLRFTSDTTPKPLVIVTPSNVSHIQASILCSKKVGLQIRTRSGGHDAEGMSYISQVPFVVVDLRNMHSIKIDVHSQTAWVEAGATLGEVYYWINEKNENFSFPGGYCPTVGVGGHFSGGGYGALMRNYGLAADNIIDAHLVNVDGKVLDRKSMGEDLFWAIRGGGGENFGIIAAWKIKLVAVPSKSTIFSVKKNMEIHGLVKLFNKWQNIAYKYDKDLVLMTHFITKNITDNHGKNKTTVHGYFSSIFHGGVDSLVDLMNKSFPELGIKKTDCKEFSWIDTTIFYSGVVNFNTANFKKEILLDRSAGKKTAFSIKLDYVKKPIPETAMVKILEKLYEEDVGVGMYVLYPYGGIMEEISESAIPFPHRAGIMYELWYTASWEKQEDNEKHINWVRSVYNFTTPYVSQNPRLAYLNYRDLDLGKTNPESPNNYTQARIWGEKYFGKNFNRLVKVKTKADPNNFFRNEQSIPPLPPHHHNPQENFLKCFSEYIPNNPANPKFIYTQHDQLYMSVLNSTIQNLRFTSDTTPKPLVIVTPSNVSHIQASILCSKKVGLQIRTRSGGHDAEGMSYISQVPFVVVDLRNMHSIKIDVHSQTAWVEAGATLGEVYYWINEKNENFSFPGGYCPTVGVGGHFSGGGYGALMRNYGLAADNIIDAHLVNVDGKVLDRKSMGEDLFWAIRGGGGENFGIIAAWKIKLVAVPSKSTIFSVKKNMEIHGLVKLFNKWQNIAYKYDKDLVLMTHFITKNITDNHGKNKTTVHGYFSSIFHGGVDSLVDLMNKSFPELGIKKTDCKEFSWIDTTIFYSGVVNFNTANFKKEILLDRSAGKKTAFSIKLDYVKKPIPETAMVKILEKLYEEDVGVGMYVLYPYGGIMEEISESAIPFPHRAGIMYELWYTASWEKQEDNEKHINWVRSVYNFTTPYVSQNPRLAYLNYRDLDLGKTNPESPNNYTQARIWGEKYFGKNFNRLVKVKTKADPNNFFRNEQSIPPLPPHHH

SEQ ID NO: 673 - DNA, 3159 bp, Artificial Sequence
  Synthetic
atgatcagattgaccgttttcttgaccgctgtttttgctgctgttgcttcttgtaacccgcaagaaaactttctaaaatgcttttctgaatacattcctaacaaccctgccaacccgaagtttatctacacacaacacgatcaattgtatatgagcgtgttgaatagtacaatacagaacctgaggtttacatccgacacaacgccgaaaccgctagtgatcgtcacaccctccaacgtaagccacattcaggcaagcattttatgcagcaagaaagtcggactgcagataaggacgaggtccggaggacacgacgccgaagggatgagctatatctcccaggtaccttttgtggtggtagacttgagaaatatgcactctatcaagatagacgttcactcccaaaccgcttgggttgaggcgggagccacccttggtgaggtctactactggatcaacgaaaagaatgaaaattttagctttcctgggggatattgcccaactgtaggtgttggcggccacttctcaggaggcggttatggggccttgatgcgtaactacggacttgcggccgacaacattatagacgcacatctagtgaatgtagacggcaaagttttagacaggaagagcatgggtgaggatcttttttgggcaattagaggcggagggggagaaaattttggaattatcgctgcttggaaaattaagctagttgcggtaccgagcaaaagcactatattctctgtaaaaaagaacatggagatacatggtttggtgaagctttttaataagtggcaaaacatcgcgtacaagtacgacaaagatctggttctgatgacgcattttataacgaaaaatatcaccgacaaccacggaaaaaacaaaaccacagtacatggctacttctctagtatatttcatgggggagtcgattctctggttgatttaatgaacaaatcattcccagagttgggtataaagaagacagactgtaaggagttctcttggattgacacaactatattctattcaggcgtagtcaactttaacacggcgaatttcaaaaaagagatccttctggacagatccgcaggtaagaaaactgcgttctctatcaaattggactatgtgaagaagcctattcccgaaaccgcgatggtcaagatacttgagaaattatacgaggaagatgtgggagttggaatgtacgtactttatccctatggtgggataatggaagaaatcagcgagagcgccattccatttccccatcgtgccggcatcatgtacgagctgtggtatactgcgagttgggagaagcaagaagacaacgaaaagcacattaactgggtcagatcagtttacaatttcaccaccccatacgtgtcccagaatccgcgtctggcttacttgaactaccgtgatcttgacctgggtaaaacgaacccggagtcacccaacaattacactcaagctagaatctggggagagaaatactttgggaagaacttcaacaggttagtaaaggttaaaaccaaggcagatccaaacaacttttttagaaatgaacaatccattcccccgctacccccgcaccatcacaacccgcaagaaaactttctaaaatgcttttctgaatacattcctaacaaccctgccaacccgaagtttatctacacacaacacgatcaattgtatatgagcgtgttgaatagtacaatacagaacctgaggtttacatccgacacaacgccgaaaccgctagtgatcgtcacaccctccaacgtaagccacattcaggcaagcattttatgcagcaagaaagtcggactgcagataaggacgaggtccggaggacacgacgccgaagggatgagctatatctcccaggtaccttttgtggtggtagacttgagaaatatgcactctatcaagatagacgttcactcccaaaccgcttgggttgaggcgggagccacccttggtgaggtctactactggatcaacgaaaagaatgaaaattttagctttcctgggggatattgcccaactgtaggtgttggcggccacttctcaggaggcggttatggggccttgatgcgtaactacggacttgcggccgacaacattatagacgcacatctagtgaatgtagacggcaaagttttagacaggaagagcatgggtgaggatcttttttgggcaattagaggcggagggggagaaaattttggaattatcgctgcttggaaaattaagctagttgcggtaccgagcaaaagcactatattctctgtaaaaaagaacatggagatacatggtttggtgaagctttttaataagtggcaaaacatcgcgtacaagtacgacaaagatctggttctgatgacgcattttataacgaaaaatatcaccgacaaccacggaaaaaacaaaaccacagtacatggctacttctctagtatatttcatgggggagtcgattctctggttgatttaatgaacaaatcattcccagagttgggtataaagaagacagactgtaaggagttctcttggattgacacaactatattctattcaggcgtagtcaactttaacacggcgaatttcaaaaaagagatccttctggacagatccgcaggtaagaaaactgcgttctctatcaaattggactatgtgaagaagcctattcccgaaaccgcgatggtcaagatacttgagaaattatacgaggaagatgtgggagttggaatgtacgtactttatccctatggtgggataatggaagaaatcagcgagagcgccattccatttccccatcgtgccggcatcatgtacgagctgtggtatactgcgagttgggagaagcaagaagacaacgaaaagcacattaactgggtcagatcagtttacaatttcaccaccccatacgtgtcccagaatccgcgtctggcttacttgaactaccgtgatcttgacctgggtaaaacgaacccggagtcacccaacaattacactcaagctagaatctggggagagaaatactttgggaagaacttcaacaggttagtaaaggttaaaaccaaggcagatccaaacaacttttttagaaatgaacaatccattcccccgctacccccgcaccatcactaa

SEQ ID NO: 674 - protein, 549 aa, Artificial Sequence
  Synthetic
MIRSVRRVFIYVSIFVLIIVLKRLLLGTDQTSNPQENFLKCFSEYIPNNPANPKFIYTQHDQLYMSVLNSTIQNLRFTSDTTPKPLVIVTPSNVSHIQASILCSKKVGLQIRTRSGGHDAEGMSYISQVPFVVVDLRNMHSIKIDVHSQTAWVEAGATLGEVYYWINEKNENFSFPGGYCPTVGVGGHFSGGGYGALMRNYGLAADNIIDAHLVNVDGKVLDRKSMGEDLFWAIRGGGGENFGIIAAWKIKLVAVPSKSTIFSVKKNMEIHGLVKLFNKWQNIAYKYDKDLVLMTHFITKNITDNHGKNKTTVHGYFSSIFHGGVDSLVDLMNKSFPELGIKKTDCKEFSWIDTTIFYSGVVNFNTANFKKEILLDRSAGKKTAFSIKLDYVKKPIPETAMVKILEKLYEEDVGVGMYVLYPYGGIMEEISESAIPFPHRAGIMYELWYTASWEKQEDNEKHINWVRSVYNFTTPYVSQNPRLAYLNYRDLDLGKTNPESPNNYTQARIWGEKYFGKNFNRLVKVKTKADPNNFFRNEQSIPPLPPHHH

SEQ ID NO: 675 - DNA, 1650 bp, Artificial Sequence
  Synthetic
atgattagatctgtgagaagggttttcatttacgtctcaatattcgtattgataatagttttgaaaagattattattgggcacagatcaaacgtcaaacccgcaagaaaactttctaaaatgcttttctgaatacattcctaacaaccctgccaacccgaagtttatctacacacaacacgatcaattgtatatgagcgtgttgaatagtacaatacagaacctgaggtttacatccgacacaacgccgaaaccgctagtgatcgtcacaccctccaacgtaagccacattcaggcaagcattttatgcagcaagaaagtcggactgcagataaggacgaggtccggaggacacgacgccgaagggatgagctatatctcccaggtaccttttgtggtggtagacttgagaaatatgcactctatcaagatagacgttcactcccaaaccgcttgggttgaggcgggagccacccttggtgaggtctactactggatcaacgaaaagaatgaaaattttagctttcctgggggatattgcccaactgtaggtgttggcggccacttctcaggaggcggttatggggccttgatgcgtaactacggacttgcggccgacaacattatagacgcacatctagtgaatgtagacggcaaagttttagacaggaagagcatgggtgaggatcttttttgggcaattagaggcggagggggagaaaattttggaattatcgctgcttggaaaattaagctagttgcggtaccgagcaaaagcactatattctctgtaaaaaagaacatggagatacatggtttggtgaagctttttaataagtggcaaaacatcgcgtacaagtacgacaaagatctggttctgatgacgcattttataacgaaaaatatcaccgacaaccacggaaaaaacaaaaccacagtacatggctacttctctagtatatttcatgggggagtcgattctctggttgatttaatgaacaaatcattcccagagttgggtataaagaagacagactgtaaggagttctcttggattgacacaactatattctattcaggcgtagtcaactttaacacggcgaatttcaaaaaagagatccttctggacagatccgcaggtaagaaaactgcgttctctatcaaattggactatgtgaagaagcctattcccgaaaccgcgatggtcaagatacttgagaaattatacgaggaagatgtgggagttggaatgtacgtactttatccctatggtgggataatggaagaaatcagcgagagcgccattccatttccccatcgtgccggcatcatgtacgagctgtggtatactgcgagttgggagaagcaagaagacaacgaaaagcacattaactgggtcagatcagtttacaatttcaccaccccatacgtgtcccagaatccgcgtctggcttacttgaactaccgtgatcttgacctgggtaaaacgaacccggagtcacccaacaattacactcaagctagaatctggggagagaaatactttgggaagaacttcaacaggttagtaaaggttaaaaccaaggcagatccaaacaacttttttagaaatgaacaatccattcccccgctacccccgcaccatcactaa

SEQ ID NO: 676 - protein, 574 aa, Artificial Sequence
  Synthetic
MSATKSIVGEALEYVNIGLSHFLALPLAQRISLIIIIPFIYNIVWQLLYSLRKDRPPNPQENFLKCFSEYIPNNPANPKFIYTQHDQLYMSVLNSTIQNLRFTSDTTPKPLVIVTPSNVSHIQASILCSKKVGLQIRTRSGGHDAEGMSYISQVPFVVVDLRNMHSIKIDVHSQTAWVEAGATLGEVYYWINEKNENFSFPGGYCPTVGVGGHFSGGGYGALMRNYGLAADNIIDAHLVNVDGKVLDRKSMGEDLFWAIRGGGGENFGIIAAWKIKLVAVPSKSTIFSVKKNMEIHGLVKLFNKWQNIAYKYDKDLVLMTHFITKNITDNHGKNKTTVHGYFSSIFHGGVDSLVDLMNKSFPELGIKKTDCKEFSWIDTTIFYSGVVNFNTANFKKEILLDRSAGKKTAFSIKLDYVKKPIPETAMVKILEKLYEEDVGVGMYVLYPYGGIMEEISESAIPFPHRAGIMYELWYTASWEKQEDNEKHINWVRSVYNFTTPYVSQNPRLAYLNYRDLDLGKTNPESPNNYTQARIWGEKYFGKNFNRLVKVKTKADPNNFFRNEQSIPPLPPHHH

SEQ ID NO: 677 - DNA, 1725 bp, Artificial Sequence
  Synthetic
atgtctgctaccaagtcaatcgttggagaggcattggaatacgtaaacattggtttaagtcatttcttggctttaccattggcccaaagaatctctttgatcataataattcctttcatttacaatattgtatggcaattactatattctttgagaaaggaccgtccacctaacccgcaagaaaactttctaaaatgcttttctgaatacattcctaacaaccctgccaacccgaagtttatctacacacaacacgatcaattgtatatgagcgtgttgaatagtacaatacagaacctgaggtttacatccgacacaacgccgaaaccgctagtgatcgtcacaccctccaacgtaagccacattcaggcaagcattttatgcagcaagaaagtcggactgcagataaggacgaggtccggaggacacgacgccgaagggatgagctatatctcccaggtaccttttgtggtggtagacttgagaaatatgcactctatcaagatagacgttcactcccaaaccgcttgggttgaggcgggagccacccttggtgaggtctactactggatcaacgaaaagaatgaaaattttagctttcctgggggatattgcccaactgtaggtgttggcggccacttctcaggaggcggttatggggccttgatgcgtaactacggacttgcggccgacaacattatagacgcacatctagtgaatgtagacggcaaagttttagacaggaagagcatgggtgaggatcttttttgggcaattagaggcggagggggagaaaattttggaattatcgctgcttggaaaattaagctagttgcggtaccgagcaaaagcactatattctctgtaaaaaagaacatggagatacatggtttggtgaagctttttaataagtggcaaaacatcgcgtacaagtacgacaaagatctggttctgatgacgcattttataacgaaaaatatcaccgacaaccacggaaaaaacaaaaccacagtacatggctacttctctagtatatttcatgggggagtcgattctctggttgatttaatgaacaaatcattcccagagttgggtataaagaagacagactgtaaggagttctcttggattgacacaactatattctattcaggcgtagtcaactttaacacggcgaatttcaaaaaagagatccttctggacagatccgcaggtaagaaaactgcgttctctatcaaattggactatgtgaagaagcctattcccgaaaccgcgatggtcaagatacttgagaaattatacgaggaagatgtgggagttggaatgtacgtactttatccctatggtgggataatggaagaaatcagcgagagcgccattccatttccccatcgtgccggcatcatgtacgagctgtggtatactgcgagttgggagaagcaagaagacaacgaaaagcacattaactgggtcagatcagtttacaatttcaccaccccatacgtgtcccagaatccgcgtctggcttacttgaactaccgtgatcttgacctgggtaaaacgaacccggagtcacccaacaattacactcaagctagaatctggggagagaaatactttgggaagaacttcaacaggttagtaaaggttaaaaccaaggcagatccaaacaacttttttagaaatgaacaatccattcccccgctacccccgcaccatcactaa

SEQ ID NO: 678 - protein, 549 aa, Artificial Sequence
  Synthetic
MIRSVRRVFIYVSIFVLIIVLKRTLSGTDQTSNPQENFLKCFSEYIPNNPANPKFIYTQHDQLYMSVLNSTIQNLRFTSDTTPKPLVIVTPSNVSHIQASILCSKKVGLQIRTRSGGHDAEGMSYISQVPFVVVDLRNMHSIKIDVHSQTAWVEAGATLGEVYYWINEKNENFSFPGGYCPTVGVGGHFSGGGYGALMRNYGLAADNIIDAHLVNVDGKVLDRKSMGEDLFWAIRGGGGENFGIIAAWKIKLVAVPSKSTIFSVKKNMEIHGLVKLFNKWQNIAYKYDKDLVLMTHFITKNITDNHGKNKTTVHGYFSSIFHGGVDSLVDLMNKSFPELGIKKTDCKEFSWIDTTIFYSGVVNFNTANFKKEILLDRSAGKKTAFSIKLDYVKKPIPETAMVKILEKLYEEDVGVGMYVLYPYGGIMEEISESAIPFPHRAGIMYELWYTASWEKQEDNEKHINWVRSVYNFTTPYVSQNPRLAYLNYRDLDLGKTNPESPNNYTQARIWGEKYFGKNFNRLVKVKTKADPNNFFRNEQSIPPLPPHHH

SEQ ID NO: 679 - DNA, 1650 bp, Artificial Sequence
  Synthetic
atgattagatctgtgagaagggttttcatttacgtctcaatattcgtattgataatagttttgaaaagaacattaagtggcacagatcaaacgtcaaacccgcaagaaaactttctaaaatgcttttctgaatacattcctaacaaccctgccaacccgaagtttatctacacacaacacgatcaattgtatatgagcgtgttgaatagtacaatacagaacctgaggtttacatccgacacaacgccgaaaccgctagtgatcgtcacaccctccaacgtaagccacattcaggcaagcattttatgcagcaagaaagtcggactgcagataaggacgaggtccggaggacacgacgccgaagggatgagctatatctcccaggtaccttttgtggtggtagacttgagaaatatgcactctatcaagatagacgttcactcccaaaccgcttgggttgaggcgggagccacccttggtgaggtctactactggatcaacgaaaagaatgaaaattttagctttcctgggggatattgcccaactgtaggtgttggcggccacttctcaggaggcggttatggggccttgatgcgtaactacggacttgcggccgacaacattatagacgcacatctagtgaatgtagacggcaaagttttagacaggaagagcatgggtgaggatcttttttgggcaattagaggcggagggggagaaaattttggaattatcgctgcttggaaaattaagctagttgcggtaccgagcaaaagcactatattctctgtaaaaaagaacatggagatacatggtttggtgaagctttttaataagtggcaaaacatcgcgtacaagtacgacaaagatctggttctgatgacgcattttataacgaaaaatatcaccgacaaccacggaaaaaacaaaaccacagtacatggctacttctctagtatatttcatgggggagtcgattctctggttgatttaatgaacaaatcattcccagagttgggtataaagaagacagactgtaaggagttctcttggattgacacaactatattctattcaggcgtagtcaactttaacacggcgaatttcaaaaaagagatccttctggacagatccgcaggtaagaaaactgcgttctctatcaaattggactatgtgaagaagcctattcccgaaaccgcgatggtcaagatacttgagaaattatacgaggaagatgtgggagttggaatgtacgtactttatccctatggtgggataatggaagaaatcagcgagagcgccattccatttccccatcgtgccggcatcatgtacgagctgtggtatactgcgagttgggagaagcaagaagacaacgaaaagcacattaactgggtcagatcagtttacaatttcaccaccccatacgtgtcccagaatccgcgtctggcttacttgaactaccgtgatcttgacctgggtaaaacgaacccggagtcacccaacaattacactcaagctagaatctggggagagaaatactttgggaagaacttcaacaggttagtaaaggttaaaaccaaggcagatccaaacaacttttttagaaatgaacaatccattcccccgctacccccgcaccatcactaa

SEQ ID NO: 680 - protein, 628 aa, Artificial Sequence
  Synthetic
MKAFTSLLCGLGLSTTLAKAISLQRPLGLDKDVLLQAAEKFGLDLDLDHLLKELDSNVLDAWAQIEHLYPNQVMSLETSTKPKFPEAIKTKKDWDFVVKNDAIENYQLRVNNPQENFLKCFSEYIPNNPANPKFIYTQHDQLYMSVLNSTIQNLRFTSDTTPKPLVIVTPSNVSHIQASILCSKKVGLQIRTRSGGHDAEGMSYISQVPFVVVDLRNMHSIKIDVHSQTAWVEAGATLGEVYYWINEKNENFSFPGGYCPTVGVGGHFSGGGYGALMRNYGLAADNIIDAHLVNVDGKVLDRKSMGEDLFWAIRGGGGENFGIIAAWKIKLVAVPSKSTIFSVKKNMEIHGLVKLFNKWQNIAYKYDKDLVLMTHFITKNITDNHGKNKTTVHGYFSSIFHGGVDSLVDLMNKSFPELGIKKTDCKEFSWIDTTIFYSGVVNFNTANFKKEILLDRSAGKKTAFSIKLDYVKKPIPETAMVKILEKLYEEDVGVGMYVLYPYGGIMEEISESAIPFPHRAGIMYELWYTASWEKQEDNEKHINWVRSVYNFTTPYVSQNPRLAYLNYRDLDLGKTNPESPNNYTQARIWGEKYFGKNFNRLVKVKTKADPNNFFRNEQSIPPLPPHHH

SEQ ID NO: 681 - DNA, 1887 bp, Artificial Sequence
  Synthetic
atgaaagcattcaccagtttactatgtggactaggcctgtccactacactcgctaaggccatctcattgcaaagaccgttgggtctagataaggacgttttgctgcaagctgcggaaaaatttggtttggacctcgacctggatcatctcttgaaggagttggactccaatgtattggacgcttgggcccaaatagagcatttgtacccaaaccaggttatgagccttgaaacttccactaagccaaaattccctgaagcaatcaaaacgaagaaagactgggactttgtggtcaagaatgacgcaattgaaaactatcagcttcgtgtcaacaacccgcaagaaaactttctaaaatgcttttctgaatacattcctaacaaccctgccaacccgaagtttatctacacacaacacgatcaattgtatatgagcgtgttgaatagtacaatacagaacctgaggtttacatccgacacaacgccgaaaccgctagtgatcgtcacaccctccaacgtaagccacattcaggcaagcattttatgcagcaagaaagtcggactgcagataaggacgaggtccggaggacacgacgccgaagggatgagctatatctcccaggtaccttttgtggtggtagacttgagaaatatgcactctatcaagatagacgttcactcccaaaccgcttgggttgaggcgggagccacccttggtgaggtctactactggatcaacgaaaagaatgaaaattttagctttcctgggggatattgcccaactgtaggtgttggcggccacttctcaggaggcggttatggggccttgatgcgtaactacggacttgcggccgacaacattatagacgcacatctagtgaatgtagacggcaaagttttagacaggaagagcatgggtgaggatcttttttgggcaattagaggcggagggggagaaaattttggaattatcgctgcttggaaaattaagctagttgcggtaccgagcaaaagcactatattctctgtaaaaaagaacatggagatacatggtttggtgaagctttttaataagtggcaaaacatcgcgtacaagtacgacaaagatctggttctgatgacgcattttataacgaaaaatatcaccgacaaccacggaaaaaacaaaaccacagtacatggctacttctctagtatatttcatgggggagtcgattctctggttgatttaatgaacaaatcattcccagagttgggtataaagaagacagactgtaaggagttctcttggattgacacaactatattctattcaggcgtagtcaactttaacacggcgaatttcaaaaaagagatccttctggacagatccgcaggtaagaaaactgcgttctctatcaaattggactatgtgaagaagcctattcccgaaaccgcgatggtcaagatacttgagaaattatacgaggaagatgtgggagttggaatgtacgtactttatccctatggtgggataatggaagaaatcagcgagagcgccattccatttccccatcgtgccggcatcatgtacgagctgtggtatactgcgagttgggagaagcaagaagacaacgaaaagcacattaactgggtcagatcagtttacaatttcaccaccccatacgtgtcccagaatccgcgtctggcttacttgaactaccgtgatcttgacctgggtaaaacgaacccggagtcacccaacaattacactcaagctagaatctggggagagaaatactttgggaagaacttcaacaggttagtaaaggttaaaaccaaggcagatccaaacaacttttttagaaatgaacaatccattcccccgctacccccgcaccatcactaa

SEQ ID NO: 682 - protein, 541 aa, Artificial Sequence
  Synthetic
MFSLKALLPLALLLVSANQVAAKVNPQENFLKCFSEYIPNNPANPKFIYTQHDQLYMSVLNSTIQNLRFTSDTTPKPLVIVTPSNVSHIQASILCSKKVGLQIRTRSGGHDAEGMSYISQVPFVVVDLRNMHSIKIDVHSQTAWVEAGATLGEVYYWINEKNENFSFPGGYCPTVGVGGHFSGGGYGALMRNYGLAADNIIDAHLVNVDGKVLDRKSMGEDLFWAIRGGGGENFGIIAAWKIKLVAVPSKSTIFSVKKNMEIHGLVKLFNKWQNIAYKYDKDLVLMTHFITKNITDNHGKNKTTVHGYFSSIFHGGVDSLVDLMNKSFPELGIKKTDCKEFSWIDTTIFYSGVVNFNTANFKKEILLDRSAGKKTAFSIKLDYVKKPIPETAMVKILEKLYEEDVGVGMYVLYPYGGIMEEISESAIPFPHRAGIMYELWYTASWEKQEDNEKHINWVRSVYNFTTPYVSQNPRLAYLNYRDLDLGKTNPESPNNYTQARIWGEKYFGKNFNRLVKVKTKADPNNFFRNEQSIPPLPPHHH

SEQ ID NO: 683 - DNA, 1626 bp, Artificial Sequence
  Synthetic
atgttcagcttgaaagcattattgccattggccttgttgttggtcagcgccaaccaagttgctgcaaaagtcaacccgcaagaaaactttctaaaatgcttttctgaatacattcctaacaaccctgccaacccgaagtttatctacacacaacacgatcaattgtatatgagcgtgttgaatagtacaatacagaacctgaggtttacatccgacacaacgccgaaaccgctagtgatcgtcacaccctccaacgtaagccacattcaggcaagcattttatgcagcaagaaagtcggactgcagataaggacgaggtccggaggacacgacgccgaagggatgagctatatctcccaggtaccttttgtggtggtagacttgagaaatatgcactctatcaagatagacgttcactcccaaaccgcttgggttgaggcgggagccacccttggtgaggtctactactggatcaacgaaaagaatgaaaattttagctttcctgggggatattgcccaactgtaggtgttggcggccacttctcaggaggcggttatggggccttgatgcgtaactacggacttgcggccgacaacattatagacgcacatctagtgaatgtagacggcaaagttttagacaggaagagcatgggtgaggatcttttttgggcaattagaggcggagggggagaaaattttggaattatcgctgcttggaaaattaagctagttgcggtaccgagcaaaagcactatattctctgtaaaaaagaacatggagatacatggtttggtgaagctttttaataagtggcaaaacatcgcgtacaagtacgacaaagatctggttctgatgacgcattttataacgaaaaatatcaccgacaaccacggaaaaaacaaaaccacagtacatggctacttctctagtatatttcatgggggagtcgattctctggttgatttaatgaacaaatcattcccagagttgggtataaagaagacagactgtaaggagttctcttggattgacacaactatattctattcaggcgtagtcaactttaacacggcgaatttcaaaaaagagatccttctggacagatccgcaggtaagaaaactgcgttctctatcaaattggactatgtgaagaagcctattcccgaaaccgcgatggtcaagatacttgagaaattatacgaggaagatgtgggagttggaatgtacgtactttatccctatggtgggataatggaagaaatcagcgagagcgccattccatttccccatcgtgccggcatcatgtacgagctgtggtatactgcgagttgggagaagcaagaagacaacgaaaagcacattaactgggtcagatcagtttacaatttcaccaccccatacgtgtcccagaatccgcgtctggcttacttgaactaccgtgatcttgacctgggtaaaacgaacccggagtcacccaacaattacactcaagctagaatctggggagagaaatactttgggaagaacttcaacaggttagtaaaggttaaaaccaaggcagatccaaacaacttttttagaaatgaacaatccattcccccgctacccccgcaccatcactaa

SEQ ID NO: 684 - protein, 593 aa, Artificial Sequence
  Synthetic
MFSLKALLPLALLLVSANQVAAKVHKAKIYKHELSDEMKEVTFEQHLAHLGQKYLTQFEKANPEVVFSREHPFFTENPQENFLKCFSEYIPNNPANPKFIYTQHDQLYMSVLNSTIQNLRFTSDTTPKPLVIVTPSNVSHIQASILCSKKVGLQIRTRSGGHDAEGMSYISQVPFVVVDLRNMHSIKIDVHSQTAWVEAGATLGEVYYWINEKNENFSFPGGYCPTVGVGGHFSGGGYGALMRNYGLAADNIIDAHLVNVDGKVLDRKSMGEDLFWAIRGGGGENFGIIAAWKIKLVAVPSKSTIFSVKKNMEIHGLVKLFNKWQNIAYKYDKDLVLMTHFITKNITDNHGKNKTTVHGYFSSIFHGGVDSLVDLMNKSFPELGIKKTDCKEFSWIDTTIFYSGVVNFNTANFKKEILLDRSAGKKTAFSIKLDYVKKPIPETAMVKILEKLYEEDVGVGMYVLYPYGGIMEEISESAIPFPHRAGIMYELWYTASWEKQEDNEKHINWVRSVYNFTTPYVSQNPRLAYLNYRDLDLGKTNPESPNNYTQARIWGEKYFGKNFNRLVKVKTKADPNNFFRNEQSIPPLPPHHH

SEQ ID NO: 685 - DNA, 1782 bp, Artificial Sequence
  Synthetic
atgttcagcttgaaagcattattgccattggccttgttgttggtcagcgccaaccaagttgctgcaaaagtccacaaggctaaaatttataaacacgagttgtccgatgagatgaaagaagtcactttcgagcaacatttagctcatttaggccaaaagtacttgactcaatttgagaaagctaaccccgaagttgttttttctagggagcatcctttcttcactgaaaacccgcaagaaaactttctaaaatgcttttctgaatacattcctaacaaccctgccaacccgaagtttatctacacacaacacgatcaattgtatatgagcgtgttgaatagtacaatacagaacctgaggtttacatccgacacaacgccgaaaccgctagtgatcgtcacaccctccaacgtaagccacattcaggcaagcattttatgcagcaagaaagtcggactgcagataaggacgaggtccggaggacacgacgccgaagggatgagctatatctcccaggtaccttttgtggtggtagacttgagaaatatgcactctatcaagatagacgttcactcccaaaccgcttgggttgaggcgggagccacccttggtgaggtctactactggatcaacgaaaagaatgaaaattttagctttcctgggggatattgcccaactgtaggtgttggcggccacttctcaggaggcggttatggggccttgatgcgtaactacggacttgcggccgacaacattatagacgcacatctagtgaatgtagacggcaaagttttagacaggaagagcatgggtgaggatcttttttgggcaattagaggcggagggggagaaaattttggaattatcgctgcttggaaaattaagctagttgcggtaccgagcaaaagcactatattctctgtaaaaaagaacatggagatacatggtttggtgaagctttttaataagtggcaaaacatcgcgtacaagtacgacaaagatctggttctgatgacgcattttataacgaaaaatatcaccgacaaccacggaaaaaacaaaaccacagtacatggctacttctctagtatatttcatgggggagtcgattctctggttgatttaatgaacaaatcattcccagagttgggtataaagaagacagactgtaaggagttctcttggattgacacaactatattctattcaggcgtagtcaactttaacacggcgaatttcaaaaaagagatccttctggacagatccgcaggtaagaaaactgcgttctctatcaaattggactatgtgaagaagcctattcccgaaaccgcgatggtcaagatacttgagaaattatacgaggaagatgtgggagttggaatgtacgtactttatccctatggtgggataatggaagaaatcagcgagagcgccattccatttccccatcgtgccggcatcatgtacgagctgtggtatactgcgagttgggagaagcaagaagacaacgaaaagcacattaactgggtcagatcagtttacaatttcaccaccccatacgtgtcccagaatccgcgtctggcttacttgaactaccgtgatcttgacctgggtaaaacgaacccggagtcacccaacaattacactcaagctagaatctggggagagaaatactttgggaagaacttcaacaggttagtaaaggttaaaaccaaggcagatccaaacaacttttttagaaatgaacaatccattcccccgctacccccgcaccatcactaa

SEQ ID NO: 686 - protein, 522 aa, Artificial Sequence
  Synthetic
MNPQENFLKCFSEYIPNNPANPKFIYTQHDQLYMSVLNSTIQNLRFTSDTTPKPLVIVTPSNVSHIQASILCSKKVGLQIRTRSGGHDAEGMSYISQVPFVVVDLRNMHSIKIDVHSQTAWVEAGATLGEVYYWINEKNENFSFPGGYCPTVGVGGHFSGGGYGALMRNYGLAADNIIDAHLVNVDGKVLDRKSMGEDLFWAIRGGGGENFGIIAAWKIKLVAVPSKSTIFSVKKNMEIHGLVKLFNKWQNIAYKYDKDLVLMTHFITKNITDNHGKNKTTVHGYFSSIFHGGVDSLVDLMNKSFPELGIKKTDCKEFSWIDTTIFYSGVVNFNTANFKKEILLDRSAGKKTAFSIKLDYVKKPIPETAMVKILEKLYEEDVGVGMYVLYPYGGIMEEISESAIPFPHRAGIMYELWYTASWEKQEDNEKHINWVRSVYNFTTPYVSQNPRLAYLNYRDLDLGKTNPESPNNYTQARIWGEKYFGKNFNRLVKVKTKADPNNFFRNEQSIPPLPPHHHHDEL

SEQ ID NO: 687 - DNA, 1569 bp, Artificial Sequence
  Synthetic
atgaacccgcaagaaaactttctaaaatgcttttctgaatacattcctaacaaccctgccaacccgaagtttatctacacacaacacgatcaattgtatatgagcgtgttgaatagtacaatacagaacctgaggtttacatccgacacaacgccgaaaccgctagtgatcgtcacaccctccaacgtaagccacattcaggcaagcattttatgcagcaagaaagtcggactgcagataaggacgaggtccggaggacacgacgccgaagggatgagctatatctcccaggtaccttttgtggtggtagacttgagaaatatgcactctatcaagatagacgttcactcccaaaccgcttgggttgaggcgggagccacccttggtgaggtctactactggatcaacgaaaagaatgaaaattttagctttcctgggggatattgcccaactgtaggtgttggcggccacttctcaggaggcggttatggggccttgatgcgtaactacggacttgcggccgacaacattatagacgcacatctagtgaatgtagacggcaaagttttagacaggaagagcatgggtgaggatcttttttgggcaattagaggcggagggggagaaaattttggaattatcgctgcttggaaaattaagctagttgcggtaccgagcaaaagcactatattctctgtaaaaaagaacatggagatacatggtttggtgaagctttttaataagtggcaaaacatcgcgtacaagtacgacaaagatctggttctgatgacgcattttataacgaaaaatatcaccgacaaccacggaaaaaacaaaaccacagtacatggctacttctctagtatatttcatgggggagtcgattctctggttgatttaatgaacaaatcattcccagagttgggtataaagaagacagactgtaaggagttctcttggattgacacaactatattctattcaggcgtagtcaactttaacacggcgaatttcaaaaaagagatccttctggacagatccgcaggtaagaaaactgcgttctctatcaaattggactatgtgaagaagcctattcccgaaaccgcgatggtcaagatacttgagaaattatacgaggaagatgtgggagttggaatgtacgtactttatccctatggtgggataatggaagaaatcagcgagagcgccattccatttccccatcgtgccggcatcatgtacgagctgtggtatactgcgagttgggagaagcaagaagacaacgaaaagcacattaactgggtcagatcagtttacaatttcaccaccccatacgtgtcccagaatccgcgtctggcttacttgaactaccgtgatcttgacctgggtaaaacgaacccggagtcacccaacaattacactcaagctagaatctggggagagaaatactttgggaagaacttcaacaggttagtaaaggttaaaaccaaggcagatccaaacaacttttttagaaatgaacaatccattcccccgctacccccgcaccatcaccatgatgaattataa

SEQ ID NO: 688 - protein, 533 aa, Artificial Sequence
  Synthetic
MSIAIGLLSTLGIGAENPQENFLKCFSEYIPNNPANPKFIYTQHDQLYMSVLNSTIQNLRFTSDTTPKPLVIVTPSNVSHIQASILCSKKVGLQIRTRSGGHDAEGMSYISQVPFVVVDLRNMHSIKIDVHSQTAWVEAGATLGEVYYWINEKNENFSFPGGYCPTVGVGGHFSGGGYGALMRNYGLAADNIIDAHLVNVDGKVLDRKSMGEDLFWAIRGGGGENFGIIAAWKIKLVAVPSKSTIFSVKKNMEIHGLVKLFNKWQNIAYKYDKDLVLMTHFITKNITDNHGKNKTTVHGYFSSIFHGGVDSLVDLMNKSFPELGIKKTDCKEFSWIDTTIFYSGVVNFNTANFKKEILLDRSAGKKTAFSIKLDYVKKPIPETAMVKILEKLYEEDVGVGMYVLYPYGGIMEEISESAIPFPHRAGIMYELWYTASWEKQEDNEKHINWVRSVYNFTTPYVSQNPRLAYLNYRDLDLGKTNPESPNNYTQARIWGEKYFGKNFNRLVKVKTKADPNNFFRNEQSIPPLPPHHH

SEQ ID NO: 689 - DNA, 1602 bp, Artificial Sequence
  Synthetic
atgtccattgcgatagggctactttcaacgctgggcataggcgcagaaaacccgcaagaaaactttctaaaatgcttttctgaatacattcctaacaaccctgccaacccgaagtttatctacacacaacacgatcaattgtatatgagcgtgttgaatagtacaatacagaacctgaggtttacatccgacacaacgccgaaaccgctagtgatcgtcacaccctccaacgtaagccacattcaggcaagcattttatgcagcaagaaagtcggactgcagataaggacgaggtccggaggacacgacgccgaagggatgagctatatctcccaggtaccttttgtggtggtagacttgagaaatatgcactctatcaagatagacgttcactcccaaaccgcttgggttgaggcgggagccacccttggtgaggtctactactggatcaacgaaaagaatgaaaattttagctttcctgggggatattgcccaactgtaggtgttggcggccacttctcaggaggcggttatggggccttgatgcgtaactacggacttgcggccgacaacattatagacgcacatctagtgaatgtagacggcaaagttttagacaggaagagcatgggtgaggatcttttttgggcaattagaggcggagggggagaaaattttggaattatcgctgcttggaaaattaagctagttgcggtaccgagcaaaagcactatattctctgtaaaaaagaacatggagatacatggtttggtgaagctttttaataagtggcaaaacatcgcgtacaagtacgacaaagatctggttctgatgacgcattttataacgaaaaatatcaccgacaaccacggaaaaaacaaaaccacagtacatggctacttctctagtatatttcatgggggagtcgattctctggttgatttaatgaacaaatcattcccagagttgggtataaagaagacagactgtaaggagttctcttggattgacacaactatattctattcaggcgtagtcaactttaacacggcgaatttcaaaaaagagatccttctggacagatccgcaggtaagaaaactgcgttctctatcaaattggactatgtgaagaagcctattcccgaaaccgcgatggtcaagatacttgagaaattatacgaggaagatgtgggagttggaatgtacgtactttatccctatggtgggataatggaagaaatcagcgagagcgccattccatttccccatcgtgccggcatcatgtacgagctgtggtatactgcgagttgggagaagcaagaagacaacgaaaagcacattaactgggtcagatcagtttacaatttcaccaccccatacgtgtcccagaatccgcgtctggcttacttgaactaccgtgatcttgacctgggtaaaacgaacccggagtcacccaacaattacactcaagctagaatctggggagagaaatactttgggaagaacttcaacaggttagtaaaggttaaaaccaaggcagatccaaacaacttttttagaaatgaacaatccattcccccgctacccccgcaccatcactaa

SEQ ID NO: 690 - protein, 540 aa, Artificial Sequence; identical to SEQ ID NO: 23
  Synthetic

SEQ ID NO: 691 - DNA, 1623 bp, Artificial Sequence
  Synthetic
atgaagtttatcagtaccttcttgacctttatcttggccgctgtctccgtaaccgctaacccgcaagaaaactttctaaaatgcttttctgaatacattcctaacaaccctgccaacccgaagtttatctacacacaacacgatcaattgtatatgagcgtgttgaatagtacaatacagaacctgaggtttacatccgacacaacgccgaaaccgctagtgatcgtcacaccctccaacgtaagccacattcaggcaagcattttatgcagcaagaaagtcggactgcagataaggacgaggtccggaggacacgacgccgaagggatgagctatatctcccaggtaccttttgtggtggtagacttgagaaatatgcactctatcaagatagacgttcactcccaaaccgcttgggttgaggcgggagccacccttggtgaggtctactactggatcaacgaaaagaatgaaaattttagctttcctgggggatattgcccaactgtaggtgttggcggccacttctcaggaggcggttatggggccttgatgcgtaactacggacttgcggccgacaacattatagacgcacatctagtgaatgtagacggcaaagttttagacaggaagagcatgggtgaggatcttttttgggcaattagaggcggagggggagaaaattttggaattatcgctgcttggaaaattaagctagttgcggtaccgagcaaaagcactatattctctgtaaaaaagaacatggagatacatggtttggtgaagctttttaataagtggcaaaacatcgcgtacaagtacgacaaagatctggttctgatgacgcattttataacgaaaaatatcaccgacaaccacggaaaaaacaaaaccacagtacatggctacttctctagtatatttcatgggggagtcgattctctggttgatttaatgaacaaatcattcccagagttgggtataaagaagacagactgtaaggagttctcttggattgacacaactatattctattcaggcgtagtcaactttaacacggcgaatttcaaaaaagagatccttctggacagatccgcaggtaagaaaactgcgttctctatcaaattggactatgtgaagaagcctattcccgaaaccgcgatggtcaagatacttgagaaattatacgaggaagatgtgggagttggaatgtacgtactttatccctatggtgggataatggaagaaatcagcgagagcgccattccatttccccatcgtgccggcatcatgtacgagctgtggtatactgcgagttgggagaagcaagaagacaacgaaaagcacattaactgggtcagatcagtttacaatttcaccaccccatacgtgtcccagaatccgcgtctggcttacttgaactaccgtgatcttgacctgggtaaaacgaacccggagtcacccaacaattacactcaagctagaatctggggagagaaatactttgggaagaacttcaacaggttagtaaaggttaaaaccaaggcagatccaaacaacttttttagaaatgaacaatccattcccccgctacccccgcaccatcaccatgatgaattataa

SEQ ID NO: 692 - protein, 536 aa, Artificial Sequence; identical to SEQ ID NO: 668
  Synthetic

SEQ ID NO: 693 - DNA, 1611 bp, Artificial Sequence
  Synthetic
atgaagtttatcagtaccttcttgacctttatcttggccgctgtctccgtaaccgctaacccgcaagaaaactttctaaaatgcttttctgaatacattcctaacaaccctgccaacccgaagtttatctacacacaacacgatcaattgtatatgagcgtgttgaatagtacaatacagaacctgaggtttacatccgacacaacgccgaaaccgctagtgatcgtcacaccctccaacgtaagccacattcaggcaagcattttatgcagcaagaaagtcggactgcagataaggacgaggtccggaggacacgacgccgaagggatgagctatatctcccaggtaccttttgtggtggtagacttgagaaatatgcactctatcaagatagacgttcactcccaaaccgcttgggttgaggcgggagccacccttggtgaggtctactactggatcaacgaaaagaatgaaaattttagctttcctgggggatattgcccaactgtaggtgttggcggccacttctcaggaggcggttatggggccttgatgcgtaactacggacttgcggccgacaacattatagacgcacatctagtgaatgtagacggcaaagttttagacaggaagagcatgggtgaggatcttttttgggcaattagaggcggagggggagaaaattttggaattatcgctgcttggaaaattaagctagttgcggtaccgagcaaaagcactatattctctgtaaaaaagaacatggagatacatggtttggtgaagctttttaataagtggcaaaacatcgcgtacaagtacgacaaagatctggttctgatgacgcattttataacgaaaaatatcaccgacaaccacggaaaaaacaaaaccacagtacatggctacttctctagtatatttcatgggggagtcgattctctggttgatttaatgaacaaatcattcccagagttgggtataaagaagacagactgtaaggagttctcttggattgacacaactatattctattcaggcgtagtcaactttaacacggcgaatttcaaaaaagagatccttctggacagatccgcaggtaagaaaactgcgttctctatcaaattggactatgtgaagaagcctattcccgaaaccgcgatggtcaagatacttgagaaattatacgaggaagatgtgggagttggaatgtacgtactttatccctatggtgggataatggaagaaatcagcgagagcgccattccatttccccatcgtgccggcatcatgtacgagctgtggtatactgcgagttgggagaagcaagaagacaacgaaaagcacattaactgggtcagatcagtttacaatttcaccaccccatacgtgtcccagaatccgcgtctggcttacttgaactaccgtgatcttgacctgggtaaaacgaacccggagtcacccaacaattacactcaagctagaatctggggagagaaatactttgggaagaacttcaacaggttagtaaaggttaaaaccaaggcagatccaaacaacttttttagaaatgaacaatccattcccccgctacccccgcaccatcactaa

SEQ ID NO: 694 - protein, 15 aa, Unknown
  Komagataella phaffii
SIAIGLLSTLGIGAE

SEQ ID NO: 695 - DNA, 45 bp, Unknown
  Komagataella phaffii
tccattgcgatagggctactttcaacgctgggcataggcgcagaa

SEQ ID NO: 696-697 - skipped (2 entries)

SEQ ID NO: 698 - protein, 517 aa, Artificial Sequence
  Synthetic
NPQENFLKCFSKHIPNNVANPKLVYTQNDSLYMSILNSTIQNLRFTSDTTPKPLVIVTPSNVSHIQATILCSKKVGLQIRTRSGGHDAEGMSYISQVPFVVVDLRNMHSIKIDVHSQTAWVEAGATLGEVYYWINEKNENLSFPGGYCPTVGVGGHFSGGGYGALMRNYGLAADNIIDAHLVNVDGKVLDRKSMGEDLFWAIRGGGGENFGIIAAWKIKLVPVPSKVTIFSVKKNMEIHGLVKLFNKWQNIAYKYDKDLLLMTHFITKNITDNHGKNKTTVHGYFSSIFHGGVDSLVDLMNKSFPELGIKKTDCKELSWIDTTIFYSGVVNFNTANFKKEILLDRSAGKKTAFSIKLDYVKKPIPETAMVKILEKLYEEDVGAGMYVLYPYGGIMEEISESAIPFPHRAGIMYELWYTASWEKQEDNEKHINWVRSVYNFTTPYVSKNPRLAYLNYRDLDLGKNNEESPNNYTQARIWGEKYFGKNFNRLVKVKTKVDPNNFFRNEQSIPPLPPHHH

SEQ ID NO: 699 - protein, 517 aa, Artificial Sequence
  Synthetic
NPQENFLKCFSKHIPNNVANPKLIYTQNDSLYSSILNSTIQNLRFTSDTTPKPLVIVTPSNVSHIQATILCSKKVGLQIRTRSGGHDAEGMSYISQVPFVVVDLRNMHSIKIDVHSQTAWVEAGATLGEVYYWINEKNENLSFPGGYCPTVGVGGHFSGGGYGALMRNYGLAADNIIDAHLVNVDGKVLDRKSMGEDLFWAIRGGGGENFGIIAAWKIKLVPVPSKVTIFSVKKNMEIHGLVKLFNKWQNIAYKYDKDLVLMTHFITKNITDNHGKNKTTVHGYFSSIFHGGVDSLVDLMNKSFPELGIKKTDCKELSWIDTTIFYSGVVNFNTANFKKEILLDRSAGKKTAFSIKLDYVKKPIPETAMVKILEKLYEEDVGAGMYVLYPYGGIMEEISESAIPFPHRAGIMYELWYTASWEKQEDNEKHINWVRSVYNFTTPYVSKNPRLAYLNYRDLDLGKNNEESPNNYTQARIWGEKYFGKNFNRLVKVKTKVDPNNFFRNEQSIPPLPPHHH

SEQ ID NO: 700 - protein, 517 aa, Artificial Sequence
  Synthetic
NPQENFLKCFSKHIPNNVANPKLVYTQNDQLYMSILNSTIQNLRFTSDTTPKPLVIVTPSNVSHIQATILCSKKVGLQIRTRSGGHDAEGMSYISQVPFVVVDLRNMHSIKIDVESQTAWVEAGATLGEVYYWINEKNENLSFPGGYCPTVGVGGHFSGGGYGALMRNYGLAADNIIDAHLVNVDGKVLDRKSMGEDLFWAIRGGGGENFGIIAAWKIKLVPVPSKVTIFSVKKNMEIHGLVKLFNKWQNIAYKYDKDLVLMTHFITKNITDNHGKNKTTVHGYFSSIFHGGVDSLVDLMNKSFPELGIKKTDCKEFSWIDTTIFYSGVVNFNTANFKKEILLDRSAGKKTAFSIKLDYVKKPIPETAMVKILEKLYEEDVGAGMYVLYPYGGIMEEISESAIPFPHRAGIMYELWYTASWEKQEDNEKHINWVRSVYNFTTPYVSKNPRLAYLNYRDLDLGKNNEESPNNYTQARIWGEKYFGKNFNRLVKVKTKVDPNNFFRNEQSIPPLPPHHH

SEQ ID NO: 701 - protein, 517 aa, Artificial Sequence
  Synthetic
NPQENFLKCFSKHIPNNVANPKLVYTQNDQLYMSILNSTIQNLRFTSDTTPKPLVIVTPSNVSHIQATILCSKKVGLQIRTRSGGHDAEGMSYISQVPFVVVDLRNMHSIKIDVHSQTAWVEAGATLGEVYYWINEKNENLSFPGGYCPTVGVGGHFSGGGYGALMRNYGLAADNIIDAHLVNVDGKVLDRKSMGEDLFWAIRGGGGENFGIIAAWKIKLVPVPSKVTIFSVKKNMEIHGLVKLFNKWQNIAYKYDKDLVLMTHFITKNITDNHGKNKTTVHGYFSSIFHGGVDSLVDLMNKSFPELGIKKTDCKEFSWIDTTIFYSGVVNFNTANFKKEILLDRSAGKKTAFSIKLDYVKKPIPETAMVKILEKLYEEDVGAGMYVLYPYGGIMEEISESAIPFPHRAGIMYEIWYTASWEKQEDNEKHINWVRSVYNFTTPYVSKNPRLAYLNYRDLDLGKNNEESPNNYTQARIWGEKYFGKNFNRLVKVKTKVDPNNFFRNEQSIPPLPPHHH

SEQ ID NO: 702 - protein, 517 aa, Artificial Sequence
  Synthetic
NPRENFLKCFSKHIPNNVANPKLVYTQNDQLYSSILNSTIQNLRFISDTTPKPLVIVTPSNVSHIQATILCSKKVGLQIRTRSGGHDAEGMSYISQVPFVVVDLRNMHSIKIDVHSQTAWVEAGATLGEVYYWINEKNENLSFPGGYCPTVGVGGHFSGGGYGALMRNYGLAADNIIDAHLVNVDGKVLDRKSMGEDLFWAIRGGGGENFGIIAAWKIKLVDVPSKVTIFSVKKNMEIHGLVKLFNKWQNIAYKYDKDLLLMTHFITKNITDNHGKNKTTVHGYFSSIFHGGVDSLVDLMNKSFPELGIKKTDCKEFSWIDTTIFYSGVVNFNTANFKKEILLDRSAGKKTAFSIKLDYVKKPIPETAMVKILEKLYEEDVGAGMYVLYPYGGIMEEISESAIPFPHRAGIMYELWYTASWEKQEDNEKHINWVRSVYNFTTPYVSKNPRLAYLNYRDLDLGKNNHESPNNYTQARIWGEKYFGKNFNRLVKVKTKVDPNNFFRNEQSIPPLPPHHH

SEQ ID NO: 703 - protein, 517 aa, Artificial Sequence
  Synthetic
NPQENFLKCFSKHIPNNVANPKLVYTQNDQLYMSILNSTIQNLRFTSDTTPKPLVIVTPSNVSHIQATILCSKKVGLQIRTRSGGHDAEGMSYISQVPFVVVDLRNMHSIKIDVHSQTAWVEAGATLGEVYYWINEKNENLSFPGGYCPTVGVGGHFSGGGYGALMRNYGLAADNIIDAHLVNVDGRVLDRKSMGEDLFWAIRGGGGENFGIIAAWKIKLVPVPSKVTIFSVKKNMEIHGLVKLFNKWQNIAYKYDKDLVLMTHFITKNITDNHGKNKTTVHGYFSSIFHGGVDSLVDLMNKSFPELGIKKTDCKEFSWIDTTIFYSGVVNFNTANFKKEILLDRSAGKKTAFSIKLDYVKKPIPETAMVKILEKLYEEDVGAGMYVLYPYGGIMEEISESAIPFPHRAGIMYELWYTASWEKQEDNEKHINWVRSVYNFTTPYVSKNPRLAYLNYRDLDLGKNNEESPNNYTQARIWGEKYFGKNFNRLVKVKTKVDPNNFFRNEQSIPPLPPHHH

SEQ ID NO: 704 - protein, 517 aa, Artificial Sequence
  Synthetic
NPQENFLKCFSKHIPNNVANAKLVYTQNDSLYSSILNSTIQNLRFTSDTTPKPLVIVTPSNVSHIQATILCSKKVGLQIRTRSGGHDAEGMSYISQVPFVVVDLRNMHSIKIDVESQTAWVEAGATLGEVYYWINEKNENLSFPGGYCPTVGVGGHFSGGGYGALMRNYGLAADNIIDAHLVNVDGKVLDRKSMGEDLFWAIRGGGGENFGIIAAWKIKLVPVPSKVTIFSVKKNMEIHGLVKLFNKWQNIAYKYDKDLLLMTHFITKNITDNHGKNKTTVHGYFSSIFHGGVDSLVDLMNKSFPELGIKKTDCKELSWIDTTIFYSGVVNFNTANFKKEILLDRSAGKKTAFSIKLDYVKKPIPETAMVKILEKLYEEDVGAGMYVLYPYGGIMEEISESAIPFPHRAGIMYELWYTASWEKQEDNEKHINWVRSVYNFTTPYVSKNPRLAYLNYRDLDLGKNNEESPNNYTQARIWGEKYFGKNFNRLVKVKTKVDPNNFFRNEQSIPPLPPHHH

SEQ ID NO: 705 - protein, 517 aa, Artificial Sequence
  Synthetic
NPQENFLKCFSKHIPNNVTNPKLVYTQNDQLYMSILNSTIQNLRFTSDTTPKPLVIVTPSNVSHIQATILCSKKVGLQIRTRSGGHDAEGMSYISQVPFVVVDLRNMHSIKIDVHSQTAWVEAGATLGEVYYWINEKNENLSFPGGYCPTVGVGGHFSGGGYGALMRNYGLAADNIIDAHLVNVDGKVLDRKSMGEDLFWAIRGGGGENFGIIAAWKIKLVPVPSKVTIFSVKKNMEIHGLVKLFNKWQNIAYKYDKDLVLMTHFITKNITDNHGKNKTTVHGYFSSIFHGGVDSLVDLMNKSFPELGIKKTDCKEFSWIDTTIFYSGVVNFNTANFKKEILLDRSAGKKTAFSIKLDYVKKPIPETAMVKILEKLYEEDVGAGMYVLYPYGGIMEEISESAIPFPHRAGIMYELWYTASWEKQEDNEKHINWVRSVYNFTTPYVSKNPRLAYLNYRDLDLGKNNEESPNNYTQARIWGEKYFGKNFNRLVKVKTKVDPNNFFRNEQSIPPLPPHHH

SEQ ID NO: 706 - protein, 517 aa, Artificial Sequence
  Synthetic
NPRENFLKCFSKHIPNNVANPKLVYTQHDQLYSSILNSTIQNLRFISDTTPKPLVIVTPSNVSHIQATILCSKKVGLQIRTRSGGHDAEGMSYISQVPFVVVDLRNMHSIKIDVHSQTAWVEAGATLGEVYYWINEKNENLSFPGGYCPTVGVGGHFSGGGYGALMRNYGLAADNIIDAHLVNVDGKVLDRKSMGEDLFWAIRGGGGENFGIIAAWKIKLVDVPSKVTIFSVKKNMEIHGLVKLFNKWQNIAYKYDKDLVLMTHFITKNITDNHGKNKTTVHGYFSSIFHGGVDSLVDLMNKSFPELGIKKTDCKEFSWIDTTIFYSGVVNFNTANFKKEILLDRSAGKKTAFSIKLDYVKKPIPETAMVKILEKLYEEDVGAGMYVLYPYGGIMEEISESAIPFPHRAGIMYELWYTASWEKQEDNEKHINWVRSVYNFTTPYVSKNPRLAYLNYRDLDLGKNNHESPTNYTQARIWGEKYFGKNFNRLVKVKTKVDPNNFFRNEQSIPPLPPHHH

SEQ ID NO: 707 - protein, 517 aa, Artificial Sequence
  Synthetic
NPQENFLKCFSKHIPNNVANPKLVYTQNDQLYSSILNSTIQNLRFTSDTTPKPLVIVTPSHVSHIQATILCAKKVGLQIRTRSGGHDAEGMSYISQVPFVVVDLRNMRSIKIDVHSQTAWVQAGATLGEVYYWINEKNENLSFPGGYCPTVGVGGHFSGGGYGALMRKYGLAADNIIDAHLVDVDGKVLDRKSMGEDLFWAIRGGGGENFGIIAAWKIKLVPVPSKVTIFSVKKNMEIHGLVKLFNKWQNIAYKYDKDLMLMTHFITKNITDNHGKNKTTVHGYFSSIFHGGVDSLVDLMNKSFPELGIKKTDCKEMSWIDTTIFYSGVVNFNTANFKKEILLDRSAGKKTAFKIKLDYVKKPIPETAMVKILEKLYEEDVGAGMYVLYPYGGIMEEISESAIPFPHRAGIMYEIWYTASWEKQEDNEKHINWVRSVYNFTTPYVSKNPRLAYLNYRDLDLGKNNEESPNNYTQARIWGEKYFGKNFNRLVKVKTKVDPNNFFRNEQSIPPLPPHHH

SEQ ID NO: 708 - protein, 517 aa, Artificial Sequence
  Synthetic
NPQENFLKCFSKHIPNNVANPKLVYTQNDSLYSSILNSTIQNLRFTSDTTPKPLVIVTPSNVSHIQATILCSKKVGLQIRTRSGGHDAEGMSYISQVPFVVVDLRNMHSIKIDVESQTAWVEAGATLGEVYYWINEKNENLSFPGGYCPTVGVGGHFSGGGYGALMRNYGLAADNIIDAHLVNVDGKVLDRKSMGEDLFWAIRGGGGENFGIIAAWKIKLVPVPSKVTIFSVKKNMEIHGLVKLFNKWQNIAYKYDKDLLLMTHFITKNITDNHGKNKTTVHGYFSSIFHGGVDSLVDLMNKSFPELGIKKEDCKELSWIDTTIFYSGVVNFNTANFKKEILLDRSAGKKTAFSIKLDYVKKPIPETAMVKILEKLYEEDVGAGMYVLYPYGGIMDEISESAIPFPHRAGIMYELWYTASWEKQEDNEKHINWVRSVYNFTTPYVSKNPRLAYLNYRDLDLGKNNEESPNNYTQARIWGEKYFGKNFNRLVKVKTKVDPNNFFRNEQSIPPLPPHHH

SEQ ID NO: 709 - protein, 517 aa, Artificial Sequence
  Synthetic
NPQENFLKCFSKHIPNNVANPKLVYTQNDQLYMSILNSTIQNLRFTSDTTPKPLVIVTPLNVSHIQATILCSKKVGLQIRTRSGGHDAEGMSYISQVPFVVVDLRNMHSIKIDVHSQTAWVEAGATLGEVYYWINEKNENLSFPGGYCPTVGVGGHFSGGGYGALMRNYGLAADNIIDAHLVNVDGKVLDRKSMGEDLFWAIRGGGGENFGIIAAWKIKLVPVPSKVTIFSVKKNMEIHGLVKLFNKWQNIAYKYDKDLVLMTHFITKNITDNHGKNKTTVHGYFSSIFHGGVDSLVDLMNKSFPELGIKKTDCKEFSWIDTTIFYSGVVNFNTANFKKEILLDRSAGKKTAFSIKLDYVKKPIPETAMVKILEKLYEEDVGAGMYVLYPYGGIMEEISESAIPFPHRAGIMYELWYTASWEKQEDNEKHINWVRSVYNFTTPYVSKNPRLAYLNYRDLDLGKNNEESPNNYTQARIWGEKYFGKNFNRLVKVKTKVDPNNFFRNEQSIPPLPPHHH

SEQ ID NO: 710 - protein, 517 aa, Artificial Sequence
  Synthetic
NPQENFLKCFSKHIPNNVANPKLIYTQNDSLYSSILNSTIQNLRFTSDTTPKPLVIVTPSNVSHIQATILCSKKVGLQIRTRSGGHDAEGMSYISQVPFVVVDLRNMHSIKIDVESQTAWVEAGATLGEVYYWINEKNENLSFPGGYCPTVGVGGHFSGGGYGALMRNYGLAADNIIDAHLVNVDGKVLDRKSMGEDLFWAIRGGGGENFGIIAAWKIKLVPVPSKVTIFSVKKNMEIHGLVKLFNKWQNIAYKYDKDLLLMTHFITKNITDNHGKNKTTVHGYFSSIFHGGVDSLVDLMNKSFPELGIKKTDCKELSWIDTTIFYSGVVNFNTANFKKEILLDRSAGKKTAFSIKLDYVKKPIPETAMVKILEKLYEEDVGAGMYVLYPYGGIMEEISESAIPFPHRAGIMYELWYTASWEKQEDNEKHINWVRSVYNFTTPYVSKNPRLAYLNYRDLDLGKNNEESPNNYTQARIWGEKYFGKNFNRLVKVKTKVDPNNFFRNEQSIPPLPPHHH

SEQ ID NO: 711 - protein, 517 aa, Artificial Sequence
  Synthetic
NPQENFLKCFSKHIPNNVANPKLVYTQNDSLYSSILNSTIQNLRFTSDTTPKPLVIVTPSNVSHIQATILCSKKVGLQIRTRSGGHDAEGMSYISQVPFVVVDLRNMHSIKIDVESQTAWVEAGATLGEVYYWINEKNENLSFPGGYCPTVGVGGHFSGGGYGALMRNYGLAADNIIDAHLVNVDGKVLDRKSMGEDLFWAIRGGGGENFGIIAAWKIKLVPVPSKVTIFSVKKNMEIHGLVKLFNKWQNIAYKYDKDLLLMTHFITKNITDNHGKNKTTVHGYFSSIFHGGVDSLVDLMNKSFPELGIKKEDCKELSWIDTTIFYSGVVNFNTANFKKEILLDRSAGKKTAFSIKLDYVKKPIPETAMVKILEKLYEEDVGAGMYVLYPYGGIMDEISESAIPFPHRAGIMYELWYTASWEKQEDNEKHINWVRSVYNFTTPYVSKNPRLAYLNYRDLDLGKNNEESPNNYTQARIWGEKYFGKNFNRLVKVKTKVDPNNFFRNEQSIPPLPLHHH

SEQ ID NO: 712 - protein, 517 aa, Artificial Sequence
  Synthetic
NPQENFLKCFSKHIPNNVANPKLVYTQNDSLYSSILNSTIQNLRFTSDTTPKPLVIVTPSNVSHIQATILCSKKVGLQIRTRSGGHDAEGMSYISQVPFVVVDLRNMHSIKIDVESQTAWVEAGATLGEVYYWINEKNENLSFPGGYCPTVGVGGHFSGGGYGALMRNYGLAADNIIDAHLVNVDGKVLDRKSMGEDLFWAIRGGGGENFGIIAAWKIKLVPVPSKVTIFSVKKNMEIHGLVKLFNKWQNIAYKYDKDLLLMTHFITKNITDNHGKNKTTVHGYFSSIFHGGVDSLVDLMNKSFPELGIKKTDCKELSWIDTTIFYSGVVNFNTANFKKEILLDRSAGKKTAFSIKLDYVKKPIPETAMVKILEKLYEEDVGVGMYVLYPYGGIMEEISESAIPFPHRAGIMYELWYTASWEKQEDNEKHINWVRSVYNFTTPYVSKNPRLAYLNYRDLDLGKNNEESPNNYTQARIWGEKYFGKNFNRLVKVKTKVDPNNFFRNEQSIPPLPPHHH

SEQ ID NO: 713 - protein, 517 aa, Artificial Sequence
  Synthetic
NPQENFLKCFSKHIPNNVANPKLIYTQNDSLYSSILNSTIQNLRFTSDTTPKPLVIVTPSNVSHIQATILCSKKVGLQIRTRSGGHDAEGMSYISQVPFVVVDLRNMHSIKIDVHSQTAWVEAGATLGEVYYWINEKNENLSFPGGYCPTVGVGGHFSGGGYGALMRNYGLAADNIIDAHLVNVDGKVLDRKSMGEDLFWAIRGGGGENFGIIAAWKIKLVPVPSKVTIFSVKKNMEIHGLVKLFNKWQNIAYKYDKDLLLMTHFITKNITDNHGKNKTTVHGYFSSIFHGGVDSLVDLMNKSFPELGIKKTDCKELSWIDTTIFYSGVVNFNTANFKKEILLDRSAGKKTAFSIKLDYVKKPIPETAMVKILEKLYEEDVGAGMYVLYPYGGIMEEISESAIPFPHRAGIMYELWYTASWEKQEDNEKHINWVRSVYNFTTPYVSKNPRLAYLNYRDLDLGKNNEESPNNYTQARIWGEKYFGKNFNRLVKVKTKVDPNNFFRNEQSIPPLPPHHH

SEQ ID NO: 714 - protein, 517 aa, Artificial Sequence
  Synthetic
NPQENFLKCFSKHIPNNVANPLLVYTQNDQLYMSILNSTIQNLRFTSDTTPKPLVIVTPSNVSHIQATILCSKKVGLQIRTRSGGHDAEGMSYISQVPFVVVDLRNMHSIKIDVHSQTAWVEAGATLGEVYYWINEKNENLSFPGGYCPTVGVGGHFSGGGYGALMRNYGLAADNIIDAHLVNVDGKVLDRKSMGEDLFWAIRGGGGENFGIIAAWKIKLVPVPSKVTIFSVKKNMEIHGLVKLFNKWQNIAYKYDKDLVLMTHFITKNITDNHGKNKTTVHGYFSSIFHGGVDSLVDLMNKSFPELGIKKTDCKEFSWIDTTIFYSGVVNFNTANFKKEILLDRSAGKKTAFSIKLDYVKKPIPETAMVKILEKLYEEDVGAGMYVLYPYGGIMEEISESAIPFPHRAGIMYELWYTASWEKQEDNEKHINWVRSVYNFTTPYVSKNPRLAYLNYRDLDLGKNNEESPNNYTQARIWGEKYFGKNFNRLVKVKTKVDPNNFFRNEQSIPPLPPHHH

SEQ ID NO: 715 - protein, 517 aa, Artificial Sequence
  Synthetic
NPQENFLKCFSKHIPNNVTNPKLIYTQNDSLYSSILNSTIQNLRFTSDTTPKPLVIVTPSNVSHIQATILCSKKVGLQIRTRSGGHDAEGMSYISQVPFVVVDLRNMHSIKIDVESQTAWVEAGATLGEVYYWINEKNENLSFPGGYCPTVGVGGHFSGGGYGALMRNYGLAADNIIDAHLVNVDGKVLDRKSMGEDLFWAIRGGGGENFGIIAAWKIKLVPVPSKVTIFSVKKNMEIHGLVKLFNKWQNIAYKYDKDLLLMTHFITKNITDNHGKNKTTVHGYFSSIFHGGVDSLVDLMNKSFPELGIKKEDCKELSWIDTTIFYSGVVNFNTANFKKEILLDRSAGKKTAFSIKLDYVKKPIPETAMVKILEKLYEEDVGAGMYVLYPYGGIMEEISESAIPFPHRAGIMYELWYTASWEKQEDNEKHINWVRSVYNFTTPYVSKNPRLAYLNYRDLDLGKNNEESPNNYTQARIWGEKYFGKNFNRLVKVKTKVDPNNFFRNEQSIPPLPPHHH

SEQ ID NO: 716 - protein, 517 aa, Artificial Sequence
  Synthetic
NPQENFLKCFSKHIPNNVANPKLVYTQNDQLYSSILNSTIQNLRFTSDTTPKPLVIVTPSHVSHIQATILCAKKVGLQIRTRSGGHDAEGMSYISQVPFVVVDLRNMHSIKIDVHSQTAWVEAGATLGEVYYWINEKNENLSFPGGYCPTVGVGGHFSGGGYGALMRKYGLAADNIIDAHLVDVDGKVLDRKSMGEDLFWAIRGGGGENFGIIAAWKIKLVPVPSKVTRFSVKKNMEIHGLVKLFNKWQNIAYKYDKDLMLMTHFITKNITDNHGKNKTTVHGYFSSIFHGGVDSLVDLMNKSFPELGIKKTDCKEMSWIDTTIFYSGVVNFNTANFKKEILLDRSAGKKTAFKIKLDYVKKPIPETAMVKILEKLYEEDVGAGMYVLYPYGGIMEEISESAIPFPHRAGIMYEIWYTASWEKQEDNEKHINWVRSVYNFTTPYVSKNPRLAYLNYRDLDLGKNNEESPNNYTQARIWGEKYFGKNFNRLVKVKTKVDPNNFFRNEQSIPPLPPHHH

SEQ ID NO: 717 - protein, 517 aa, Artificial Sequence
  Synthetic
NPHENFLKCFSKHIPNNVANPKLVYTQHDQLYSSILNSTIQNLRFISDTTPKPLVIVTPSNVSHIQATILCSKKVGLQIRTRSGGHDAEGMSYISQVPFVVVDLRNMHSIKIDVHSQTAWVEAGATLGEVYYWINEKNENLSFPGGYCPTVGVGGHFSGGGYGALMRNYGLAADNIIDAHLVNVDGKVLDRKSMGEDLFWAIRGGGGENFGIIAAWKIKLVDVPSKVTIFSVKKNMEIHGLVKLFNKWQNIAYKYDKDLVLMTHFITKNITDNHGKNKTTVHGYFSSIFHGGVDSLVDLMNKSFPELGIKKTDCKEFSWIDTTIFYSGVVNFNTANFKKEILLDRSAGKKTAFSIKLDYVKKPIPETAMVKILEKLYEEDVGAGMYVLYPYGGIMEEISESAIPFPHRAGIMYELWYTASWEKQEDNEKHINWVRSVYNFTTPYVSKNPRLAYLNYRDLDLGKNNHESPNNYTQARIWGEKYFGKNFNRLVKVKTKVDPNNFFRNEQSIPPLPPHHH

SEQ ID NO: 718 - protein, 517 aa, Artificial Sequence
  Synthetic
NPRENFLKCFSKHIPNNVANPKLVYTQNDSLYSSILNSTIQNLRFTSDTTPKPLVIVTPSNVSHIQATILCSKKVGLQIRTRSGGHDAEGMSYISQVPFVVVDLRNMHSIKIDVESQTAWVEAGATLGEVYYWINEKNENLSFPGGYCPTVGVGGHFSGGGYGALMRNYGLAADNIIDAHLVNVDGKVLDRKSMGEDLFWAIRGGGGENFGIIAAWKIKLVDVPSKVTIFSVKKNMEIHGLVKLFNKWQNIAYKYDKDLLLMTHFITKNITDNHGKNKTTVHGYFSSIFHGGVDSLVDLMNKSFPELGIKKTDCKELSWIDTTIFYSGVVNFNTANFKKEILLDRSAGKKTAFSIKLDYVKKPIPETAMVKILEKLYEEDVGAGMYVLYPYGGIMEEISESAIPFPHRAGIMYELWYTASWEKQEDNEKHINWVRSVYNFTTPYVSKNPRLAYLNYRDLDLGKNNHESPNNYTQARIWGEKYFGKNFNRLVKVKTKVDPNNFFRNEQSIPPLPPHHH

SEQ ID NO: 719 - protein, 517 aa, Artificial Sequence
  Synthetic
NPQENFLKCFSKHIPNNVANPKLVYTQNDSLYSSILNSTIQNLRFTSDTTPKPLVIVTPSNVSHIQATILCSKKVGLQIRTRSGGHDAEGMSYISQVPFVVVDLRNMHSIKIDVESQTAWVEAGATLGEVYYWINEKNENLSFPGGYCPTVGVGGHFSGGGYGALMRNYGLAADNIIDAHLVNVDGKVLDRKSMGEDLFWAIRGGGGENFGIIAAWKIKLVPVPSKVTIFSVKKNMEIHGLVKLFNKWQNIAYKYDKDLLLMTHFITKNITDNHGKNKTTVHGYFSSIFHGGVDSLVDLMNKSFPELGIKKTDCKEFSWIDTTIFYSGVVNFNTANFKKEILLDRSAGKKTAFSIKLDYVKKPIPETAMVKILEKLYEEDVGAGMYVLYPYGGIMEEISESAIPFPHRAGIMYELWYTASWEKQEDNEKHINWVRSVYNFTTPYVSKNPRLAYLNYRDLDLGKNNEESPNNYTQARIWGEKYFGKNFNRLVKVKTKVDPNNFFRNEQSIPPLPPHHH

SEQ ID NO: 720 - protein, 517 aa, Artificial Sequence
  Synthetic
NPQENFLKCFSKHIPNNVANPKLVYTQNDQLYMSILNSTIQNLRFTSDTTPKPLVIVTPSHVSHIQATILCSKKVGLQIRTRSGGHDAEGMSYISQVPFVVVDLRNMHSIKIDVHSQTAWVEAGATLGEVYYWINEKNENLSFPGGYCPTVGVGGHFSGGGYGALMRKYGLAADNIIDAHLVDVDGKVLDRKSMGEDLFWAIRGGGGENFGIIAAWKIKLVPVPSKVTIFSVKKNMEIHGLVKLFNKWQNIAYKYDKDLVLMTHFITKNITDNHGKNKTTVHGYFSSIFHGGVDSLVDLMNKSFPELGIKKTDCKEMSWIDTTIFYSGVVNFNTANFKKEILLDRSAGKKTAFKIKLDYVKKPIPETAMVKILEKLYEEDVGAGMYVLYPYGGIMEEISESAIPFPHRAGIMYEIWYTASWEKQEDNEKHINWVRSVYNFTTPYVSKNPRLAYLNYRDLDLGKNNEESPNNYTQARIWGEKYFGKNFNRLVKVKTKVDPNNFFRNEQSIPPLPPHHH

SEQ ID NO: 721 - protein, 517 aa, Artificial Sequence
  Synthetic
NPQENFLKCFSKHIPNNVANPKLVYTQNDQLYSSILNSTIQNLRFTSDTTPKPLVIVTPSHVSHIQATILCAKKVGLQIRTRSGGHDAEGMSYISQVPFVVVDLRNMHSIKIDVHSQTAWVQAGATLGEVYYWINEKNENLSFPGGYCPTVGVGGHFSGGGYGALMRKYGLAADNIIDAHLVDVDGKVLDRKSMGEDLFWAIRGGGGENFGIIAAWKIKLVPVPSKVTRFSVKKNMEIHGLVKLFNKWQNIAYKYDKDLMLMTHFITKNITDNHGKNKTTVHGYFSSIFHGGVDSLVDLMNKSFPELGIKKTDCKEMSWIDTTIFYSGVVNFNTANFKKEILLDRSAGKKTAFKIKLDYVKKPIPETAMVKILEKLYEEDVGAGMYVLYPYGGIMEEISESAIPFPHRAGIMYEIWYTASWEKQEDNEKHINWVRSVYNFTTPYVSKNPRLAYLNYRDLDLGKNNEESPNNYTQARIWGEKYFGKNFNRLVKVKTKVDPNNFFRNEQSIPPLPPHHH

SEQ ID NO: 722 - protein, 517 aa, Artificial Sequence
  Synthetic
NPQENFLKCFSKHIPNNVANPKLVYTQNDQLYSSILNSTIQNLRFTSDTTPKPLVIVTPSHVSHIQATILCAKKVGLQIRTRSGGHDAEGMSYISQVPFVVVDLRNMHSIKIDVHSQTAWVQAGATLGEVYYWINEKNENLSFPGGYCPTVGVGGHFSGGGYGALMRKYGLAADNIIDAHLVDVDGKVLDRKSMGEDLFWAIRGGGGENFGIIAAWKIKLVPVPSKVTIFSVKKNMEIHGLVKLFNKWQNIAYKYDKDLMLMTHFITKNITDNHGKNKTTVHGYFSSIFHGGVDSLVDLMNKSFPELGIKKTDCKEMSWIDTTIFYSGVVNFNTANFKKEILLDRSAGKKTAFKIKLDYVKKPIPETAMVKILEKLYEEDVGAGMYVLYPYGGIMEEISESAIPFPHRAGIMYEIWYTASWEKQEDNEKHINWVRSVYNFTTPYVSKNPRLAYLNYRDLDLGKNNEESPNNYTQARIWGEKYFGKNFNRLVKVKTKVDPNNFFRNEQSIPPLPPHHH

SEQ ID NO: 723 - protein, 517 aa, Artificial Sequence
  Synthetic
NPQENFLKCFSKHIPNNVANPKLVYTQNDQLYMSILNSTIQNLRFTSDTTPKPLVIVTPSNVSHIQATILCSKKVGLQIRTRSGGHDAEGMSYISQVPFVVVDLRNMHSIKIDVHSQTAWVEAGATLGEVYYWINEKNENLSFPGGYCPTVGVGGHFSGGGYGALMRNYGLAADNIIDAHLVNVDGKVLDRKSMGEDLFWAIRGGGGENFGIIAAWKIKLVPVPSKVTIFSVKKNMEIHGLVKLFNKWQNIAYKYDKDLLLMTHFITKNITDNHGKNKTTVHGYFSSIFHGGVDSLVDLMNKSFPELGIKKTDCKEFSWIDTTIFYSGVVNFNTANFKKEILLDRSAGKKTAFSIKLDYVKKPIPETAMVKILEKLYEEDVGAGMYVLYPYGGIMEEISESAIPFPHRAGIMYELWYTASWEKQEDNEKHINWVRSVYNFTTPYVSKNPRLAYLNYRDLDLGKNNEESPNNYTQARIWGEKYFGKNFNRLVKVKTKVDPNNFFRNEQSIPPLPPHHH

SEQ ID NO: 724 - protein, 517 aa, Artificial Sequence
  Synthetic
NPQENFLKCFSKHIPNNVTNPKLVYTQNDSLYSSILNSTIQNLRFTSDTTPKPLVIVTPSNVSHIQATILCSKKVGLQIRTRSGGHDAEGMSYISQVPFVVVDLRNMHSIKIDVESQTAWVEAGATLGEVYYWINEKNENLSFPGGYCPTVGVGGHFSGGGYGALMRNYGLAADNIIDAHLVNVDGKVLDRKSMGEDLFWAIRGGGGENFGIIAAWKIKLVPVPSKVTIFSVKKNMEIHGLVKLFNKWQNIAYKYDKDLLLMTHFITKNITDNHGKNKTTVHGYFSSIFHGGVDSLVDLMNKSFPELGIKKEDCKELSWIDTTIFYSGVVNFNTANFKKEILLDRSAGKKTAFSIKLDYVKKPIPETAMVKILEKLYEEDVGAGMYVLYPYGGIMDEISESAIPFPHRAGIMYELWYTASWEKQEDNEKHINWVRSVYNFTTPYVSKNPRLAYLNYRDLDLGKNNEESPNNYTQARIWGEKYFGKNFNRLVKVKTKVDPNNFFRNEQSIPPLPPHHH

SEQ ID NO: 725 - protein, 517 aa, Artificial Sequence
  Synthetic
NPRENFLKCFSKHIPNNVTNPKLVYTQNDSLYSSILNSTIQNLRFTSDTTPKPLVIVTPSNVSHIQATILCSKKVGLQIRTRSGGHDAEGMSYISQVPFVVVDLRNMHSIKIDVHSQTAWVEAGATLGEVYYWINEKNENLSFPGGYCPTVGVGGHFSGGGYGALMRNYGLAADNIIDAHLVNVDGKVLDRKSMGEDLFWAIRGGGGENFGIIAAWKIKLVDVPSKVTIFSVKKNMEIHGLVKLFNKWQNIAYKYDKDLLLMTHFITKNITDNHGKNKTTVHGYFSSIFHGGVDSLVDLMNKSFPELGIKKEDCKELSWIDTTIFYSGVVNFNTANFKKEILLDRSAGKKTAFSIKLDYVKKPIPETAMVKILEKLYEEDVGAGMYVLYPYGGIMEEISESAIPFPHRAGIMYELWYTASWEKQEDNEKHINWVRSVYNFTTPYVSKNPRLAYLNYRDLDLGKNNEESPNNYTQARIWGEKYFGKNFNRLVKVKTKVDPNNFFRNEQSIPPLPPHHH

SEQ ID NO: 726 - protein, 517 aa, Artificial Sequence
  Synthetic
NPRENFLKCFSKHIPNNVTNPKLVYTQNDSLYSSILNSTIQNLRFTSDTTPKPLVIVTPSNVSHIQATILCSKKVGLQIRTRSGGHDAEGMSYISQVPFVVVDLRNMHSIKIDVHSQTAWVEAGATLGEVYYWINEKNENLSFPGGYCPTVGVGGHFSGGGYGALMRNYGLAADNIIDAHLVNVDGKVLDRKSMGEDLFWAIRGGGGENFGIIAAWKIKLVDVPSKVTIFSVKKNMEIHGLVKLFNKWQNIAYKYDKDLVLMTHFITKNITDNHGKNKTTVHGYFSSIFHGGVDSLVDLMNKSFPELGIKKTDCKELSWIDTTIFYSGVVNFNTANFKKEILLDRSAGKKTAFSIKLDYVKKPIPETAMVKILEKLYEEDVGAGMYVLYPYGGIMDEISESAIPFPHRAGIMYELWYTASWEKQEDNEKHINWVRSVYNFTTPYVSKNPRLAYLNYRDLDLGKNNEESPNNYTQARIWGEKYFGKNFNRLVKVKTKVDPNNFFRNEQSIPPLPPHHH

SEQ ID NO: 727 - protein, 517 aa, Artificial Sequence
  Synthetic
NPQENFLKCFSKHIPNNVANPKLVYTQNDSLYSSILNSTIQNLRFTSDTTPKPLVIVTPSNVSHIQATILCSKKVGLQIRTRSGGHDAEGMSYISQVPFVIVDLRNMHSIKIDVESQTAWVEAGATLGEVYYWINEKNENLSFPGGYCPTVGVGGHFSGGGYGALMRNYGLAADNIIDAHLVNVDGKVLDRKSMGEDLFWAIRGGGGENFGIIAAWKIKLVPVPSKVTIFSVKKNMEIHGLVKLFNKWQNIAYKYDKDLLLMTHFITKNITDNHGKNKTTVHGYFSSIFHGGVDSLVDLMNKSFPELGIKKTDCKELSWIDTTIFYSGVVNFNTANFKKEILLDRSAGKKTAFSIKLDYVKKPIPETAMVKILEKLYEEDVGAGMYVLYPYGGIMDEISESAIPFPHRAGIMYELWYTASWEKQEDNEKHINWVRSVYNFTTPYVSKNPRLAYLNYRDLDLGKNNEESPNNYTQARIWGEKYFGKNFNRLVKVKTKVDPNNFFRNEQSIPPLPPHHH

SEQ ID NO: 728 - protein, 517 aa, Artificial Sequence
  Synthetic
NPQENFLKCFSKHIPNNVANPKLVYTQNDQLYSSILNSTIQNLRFTSDTTPKPLVIVTPSHVSHIQATILCAKKVGLQIRTRSGGHDAEGMSYISQVPFVVVDLRNMHSIKIDVHSQTAWVEAGATLGEVYYWINEKNENLSFPGGYCPTVGVGGHFSGGGYGALMRKYGLAADNIIDAHLVDVDGKVLDRKSMGEDLFWAIRGGGGENFGIIAAWKIKLVPVPSKVTIFSVKKNMEIHGLVKLFNKWQNIAYKYDKDLMLMTHFITKNITDNHGKNKTTVHGYFSSIFHGGVDSLVDLMNKSFPELGIKKTDCKEMSWIDTTIFYSGVVNFNTANFKKEILLDRSAGKKTAFKIKLDYVKKPIPETAMVKILEKLYEEDVGAGMYVLYPYGGIMEEISESAIPFPHRAGIMYEIWYTASWEKQEDNEKHINWVRSVYNFTTPYVSKNPRLAYLNYRDLDLGKNNEESPNNYTQARIWGEKYFGKNFNRLVKVKTKVDPNNFFRNEQSIPPLPPHHH

SEQ ID NO: 729 - protein, 517 aa, Artificial Sequence
  Synthetic
NPQENFLKCFSKHIPNNVANPKLVYTQNDSLYSSILNSTIQNLRFTSDTTPKPLVIVTPSNVSHIQATILCSKKVGLQIRTRSGGHDAEGMSYISQVPFVIVDLRNMHSIKIDVESQTAWVEAGATLGEVYYWINEKNENLSFPGGYCPTVGVGGHFSGGGYGALMRNYGLAADNIIDAHLVNVDGKVLDRKSMGEDLFWAIRGGGGENFGIIAAWKIKLVPVPSKVTIFSVKKNMEIHGLVKLFNKWQNIAYKYDKDLLLMTHFITKNITDNHGKNKTTVHGYFSSIFHGGVDSLVDLMNKSFPELGIKKEDCKELSWIDTTIFYSGVVNFNTANFKKEILLDRSAGKKTAFSIKLDYVKKPIPETAMVKILEKLYEEDVGAGMYVLYPYGGIMEEISESAIPFPHRAGIMYELWYTASWEKQEDNEKHINWVRSVYNFTTPYVSKNPRLAYLNYRDLDLGKNNEESPNNYTQARIWGEKYFGKNFNRLVKVKTKVDPNNFFRNEQSIPPLPPHHH

SEQ ID NO: 730 - protein, 517 aa, Artificial Sequence
  Synthetic
NPRENFLKCFSKHIPNNVANPKLVYTQNDSLYSSILNSTIQNLRFTSDTTPKPLVIVTPSNVSHIQATILCSKKVGLQIRTRSGGHDAEGMSYISQVPFVVVDLRNMHSIKIDVHSQTAWVEAGATLGEVYYWINEKNENLSFPGGYCPTVGVGGHFSGGGYGALMRNYGLAADNIIDAHLVNVDGKVLDRKSMGEDLFWAIRGGGGENFGIIAAWKIKLVDVPSKVTIFSVKKNMEIHGLVKLFNKWQNIAYKYDKDLLLMTHFITKNITDNHGKNKTTVHGYFSSIFHGGVDSLVDLMNKSFPELGIKKTDCKEFSWIDTTIFYSGVVNFNTANFKKEILLDRSAGKKTAFSIKLDYVKKPIPETAMVKILEKLYEEDVGAGMYVLYPYGGIMEEISESAIPFPHRAGIMYELWYTASWEKQEDNEKHINWVRSVYNFTTPYVSKNPRLAYLNYRDLDLGKNNEESPNNYTQARIWGEKYFGKNFNRLVKVKTKVDPNNFFRNEQSIPPLPPHHH

SEQ ID NO: 731 - protein, 517 aa, Artificial Sequence
  Synthetic
NPRENFLKCFSKHIPNNVANPKLVYTQNDQLYSSILNSTIQNLRFTSDTTPKPLVIVTPSNVSHIQATILCSKKVGLQIRTRSGGHDAEGMSYISQVPFVVVDLRNMHSIKIDVESQTAWVEAGATLGEVYYWINEKNENLSFPGGYCPTVGVGGHFSGGGYGALMRNYGLAADNIIDAHLVNVDGKVLDRKSMGEDLFWAIRGGGGENFGIIAAWKIKLVDVPSKVTIFSVKKNMEIHGLVKLFNKWQNIAYKYDKDLLLMTHFITKNITDNHGKNKTTVHGYFSSIFHGGVDSLVDLMNKSFPELGIKKTDCKELSWIDTTIFYSGVVNFNTANFKKEILLDRSAGKKTAFSIKLDYVKKPIPETAMVKILEKLYEEDVGAGMYVLYPYGGIMEEISESAIPFPHRAGIMYELWYTASWEKQEDNEKHINWVRSVYNFTTPYVSKNPRLAYLNYRDLDLGKNNEESPNNYTQARIWGEKYFGKNFNRLVKVKTKVDPNNFFRNEQSIPPLPPHHH

SEQ ID NO: 732 - protein, 517 aa, Artificial Sequence
  Synthetic
NPQENFLKCFSKHIPNNVANPKLVYTQNDSLYSSILNSTIQNLRFTSDTTPKPLVIVTPSNVSHIQATILCSKKVGLQIRTRSGGHDAEGMSYISQVPFVVVDLRNMHSIKIDVESQTAWVEAGATLGEVYYWINEKNENLSFPGGYCPTVGVGGHFSGGGYGALMRNYGLAADNIIDAHLVNVDGKVLDRKSMGEDLFWAIRGGGGENFGIIAAWKIKLVPVPSKVTIFSVKKNMEIHGLVKLFNKWQNIAYKYDKDLLLMTHFITKNITDNHGKNKTTVHGYFSSIFHGGVDSLVDLMNKSFPELGIKKTDCKELSWIDTTIFYSGVVNFNTANFKKEILLDRSAGKKTAFSIKLDYVKKPIPETAMVKILEKLYEEDVGAGMYVLYPYGGIMDEISESAIPFPHRAGIMYELWYTASWEKQEDNEKHINWVRSVYNFTTPYVSKNPRLAYLNYRDLDLGKNNEESPNNYTQARIWGEKYFGKNFNRLVKVKTKVDPNNFFRNEQSIPPLPPHHH

SEQ ID NO: 733 - protein, 517 aa, Artificial Sequence
  Synthetic
NPQENFLKCFSKHIPNNVTNPKLVYTQNDSLYSSILNSTIQNLRFTSDTTPKPLVIVTPSNVSHIQATILCSKKVGLQIRTRSGGHDAEGMSYISQVPFVVVDLRNMHSIKIDVHSQTAWVEAGATLGEVYYWINEKNENLSFPGGYCPTVGVGGHFSGGGYGALMRNYGLAADNIIDAHLVNVDGKVLDRKSMGEDLFWAIRGGGGENFGIIAAWKIKLVPVPSKVTIFSVKKNMEIHGLVKLFNKWQNIAYKYDKDLLLMTHFITKNITDNHGKNKTTVHGYFSSIFHGGVDSLVDLMNKSFPELGIKKEDCKELSWIDTTIFYSGVVNFNTANFKKEILLDRSAGKKTAFSIKLDYVKKPIPETAMVKILEKLYEEDVGAGMYVLYPYGGIMEEISESAIPFPHRAGIMYELWYTASWEKQEDNEKHINWVRSVYNFTTPYVSKNPRLAYLNYRDLDLGKNNEESPNNYTQARIWGEKYFGKNFNRLVKVKTKVDPNNFFRNEQSIPPLPPHHH

SEQ ID NO: 734 - protein, 517 aa, Artificial Sequence
  Synthetic
NPQENFLKCFSKHIPNNVTNPKLVYTQNDSLYSSILNSTIQNLRFTSDTTPKPLVIVTPSNVSHIQATILCSKKVGLQIRTRSGGHDAEGMSYISQVPFVVVDLRNMHSIKIDVESQTAWVEAGATLGEVYYWINEKNENLSFPGGYCPTVGVGGHFSGGGYGALMRNYGLAADNIIDAHLVNVDGKVLDRKSMGEDLFWAIRGGGGENFGIIAAWKIKLVPVPSKVTIFSVKKNMEIHGLVKLFNKWQNIAYKYDKDLLLMTHFITKNITDNHGKNKTTVHGYFSSIFHGGVDSLVDLMNKSFPELGIKKEDCKELSWIDTTIFYSGVVNFNTANFKKEILLDRSAGKKTAFSIKLDYVKKPIPETAMVKILEKLYEEDVGAGMYVLYPYGGIMEEISESAIPFPHRAGIMYELWYTASWEKQEDNEKHINWVRSVYNFTTPYVSKNPRLAYLNYRDLDLGKNNEESPNNYTQARIWGEKYFGKNFNRLVKVKTKVDPNNFFRNEQSIPPLPPHHH

SEQ ID NO: 735 - protein, 517 aa, Artificial Sequence
  Synthetic
NPQENFLKCFSKHIPNNVANPKLVYTQNDQLYSSILNSTIQNLRFTSDTTPKPLVIVTPSNVSHIQATILCSKKVGLQIRTRSGGHDAEGMSYISQVPFVVVDLRNMHSIKIDVHSQTAWVEAGATLGEVYYWINEKNENLSFPGGYCPTVGVGGHFSGGGYGALMRNYGLAADNIIDAHLVNVDGKVLDRKSMGEDLFWAIRGGGGENFGIIAAWKIKLVPVPSKVTIFSVKKNMEIHGLVKLFNKWQNIAYKYDKDLLLMTHFITKNITDNHGKNKTTVHGYFSSIFHGGVDSLVDLMNKSFPELGIKKEDCKELSWIDTTIFYSGVVNFNTANFKKEILLDRSAGKKTAFSIKLDYVKKPIPETAMVKILEKLYEEDVGAGMYVLYPYGGIMEEISESAIPFPHRAGIMYELWYTASWEKQEDNEKHINWVRSVYNFTTPYVSKNPRLAYLNYRDLDLGKNNEESPNNYTQARIWGEKYFGKNFNRLVKVKTKVDPNNFFRNEQSIPPLPPHHH

SEQ ID NO: 736 - protein, 517 aa, Artificial Sequence
  Synthetic
NPQENFLKCFSKHIPNNVANPKLVYTQNDQLYMSILNSTIQNLRFTSDTTPKPLVIVTPSNVSHIQATILCSKKVGLQIRTRSGGHDAEGMSYISQVPFVVVDLRNMHSIKIDVHSQTAWVEAGATLGEVYYWINEKNENLSFPGGYCPTVGVGGHFSGGGYGALMRNYGLAADNIIDAHLVNVDGKVLDRKSMGEDLFWAIRGGGGENFGIIAAWKIKLVPVPSKVTIFSVKKNMEIHGLVKLFNKWQNIAYKYDKDLMLMTHFITKNITDNHGKNKTTVHGYFSSIFHGGVDSLVDLMNKSFPELGIKKTDCKEFSWIDTTIFYSGVVNFNTANFKKEILLDRSAGKKTAFSIKLDYVKKPIPETAMVKILEKLYEEDVGAGMYVLYPYGGIMEEISESAIPFPHRAGIMYELWYTASWEKQEDNEKHINWVRSVYNFTTPYVSKNPRLAYLNYRDLDLGKNNEESPNNYTQARIWGEKYFGKNFNRLVKVKTKVDPNNFFRNEQSIPPLPPHHH

SEQ ID NO: 737 - protein, 517 aa, Artificial Sequence
  Synthetic
NPQENFLKCFSKHIPNNVANPKLVYTQNDSLYSSILNSTIQNLRFTSDTTPKPLVIVTPSNVSHIQATILCSKKVGLQIRTRSGGHDAEGMSYISQVPFVIVDLRNMHSIKIDVHSQTAWVEAGATLGEVYYWINEKNENLSFPGGYCPTVGVGGHFSGGGYGALMRNYGLAADNIIDAHLVNVDGKVLDRKSMGEDLFWAIRGGGGENFGIIAAWKIKLVPVPSKVTIFSVKKNMEIHGLVKLFNKWQNIAYKYDKDLVLMTHFITKNITDNHGKNKTTVHGYFSSIFHGGVDSLVDLMNKSFPELGIKKTDCKELSWIDTTIFYSGVVNFNTANFKKEILLDRSAGKKTAFSIKLDYVKKPIPETAMVKILEKLYEEDVGAGMYVLYPYGGIMEEISESAIPFPHRAGIMYELWYTASWEKQEDNEKHINWVRSVYNFTTPYVSKNPRLAYLNYRDLDLGKNNEESPNNYTQARIWGEKYFGKNFNRLVKVKTKVDPNNFFRNEQSIPPLPPHHH

SEQ ID NO: 738 - protein, 517 aa, Artificial Sequence
  Synthetic
NPQENFLKCFSKHIPNNVANPKLVYTQNDQLYMSILNSTIQNLRFTSDTTPKPLVIVTPSNVSHIQATILCSKKVGLQIRTRSGGHDAEGMSYISQVPFVVVDLRNMHSIKIDVHSQTAWVEAGATLGEVYYWINEKNENLSFPGGYCPTVGVGGHFSGGGYGALMRKYGLAADNIIDAHLVNVDGKVLDRKSMGEDLFWAIRGGGGENFGIIAAWKIKLVPVPSKVTIFSVKKNMEIHGLVKLFNKWQNIAYKYDKDLVLMTHFITKNITDNHGKNKTTVHGYFSSIFHGGVDSLVDLMNKSFPELGIKKTDCKEFSWIDTTIFYSGVVNFNTANFKKEILLDRSAGKKTAFSIKLDYVKKPIPETAMVKILEKLYEEDVGAGMYVLYPYGGIMEEISESAIPFPHRAGIMYELWYTASWEKQEDNEKHINWVRSVYNFTTPYVSKNPRLAYLNYRDLDLGKNNEESPNNYTQARIWGEKYFGKNFNRLVKVKTKVDPNNFFRNEQSIPPLPPHHH

SEQ ID NO: 739 - protein, 517 aa, Artificial Sequence
  Synthetic
NPQENFLKCFSKHIPNNVANPKLVYTQNDQLYSSILNSTIQNLRFTSDTTPKPLVIVTPSNVSHIQATILCSKKVGLQIRTRSGGHDAEGMSYISQVPFVVVDLRNMHSIKIDVHSQTAWVEAGATLGEVYYWINEKNENLSFPGGYCPTVGVGGHFSGGGYGALMRNYGLAADNIIDAHLVNVDGKVLDRKSMGEDLFWAIRGGGGENFGIIAAWKIKLVPVPSKVTIFSVKKNMEIHGLVKLFNKWQNIAYKYDKDLVLMTHFITKNITDNHGKNKTTVHGYFSSIFHGGVDSLVDLMNKSFPELGIKKEDCKELSWIDTTIFYSGVVNFNTANFKKEILLDRSAGKKTAFSIKLDYVKKPIPETAMVKILEKLYEEDVGAGMYVLYPYGGIMDEISESAIPFPHRAGIMYELWYTASWEKQEDNEKHINWVRSVYNFTTPYVSKNPRLAYLNYRDLDLGKNNEESPNNYTQARIWGEKYFGKNFNRLVKVKTKVDPNNFFRNEQSIPPLPPHHH

SEQ ID NO: 740 - protein, 517 aa, Artificial Sequence
  Synthetic
NPRENFLKCFSKHIPNNVANPKLVYTQNDSLYSSILNSTIQNLRFTSDTTPKPLVIVTPSNVSHIQATILCSKKVGLQIRTRSGGHDAEGMSYISQVPFVVVDLRNMHSIKIDVHSQTAWVEAGATLGEVYYWINEKNENLSFPGGYCPTVGVGGHFSGGGYGALMRNYGLAADNIIDAHLVNVDGKVLDRKSMGEDLFWAIRGGGGENFGIIAAWKIKLVDVPSKVTIFSVKKNMEIHGLVKLFNKWQNIAYKYDKDLLLMTHFITKNITDNHGKNKTTVHGYFSSIFHGGVDSLVDLMNKSFPELGIKKEDCKELSWIDTTIFYSGVVNFNTANFKKEILLDRSAGKKTAFSIKLDYVKKPIPETAMVKILEKLYEEDVGAGMYVLYPYGGIMEEISESAIPFPHRAGIMYELWYTASWEKQEDNEKHINWVRSVYNFTTPYVSKNPRLAYLNYRDLDLGKNNHESPNNYTQARIWGEKYFGKNFNRLVKVKTKVDPNNFFRNEQSIPPLPPHHH

SEQ ID NO: 741 - protein, 517 aa, Artificial Sequence
  Synthetic
NPRENFLKCFSKHIPNNVTNPKLVYTQNDSLYSSILNSTIQNLRFTSDTTPKPLVIVTPSNVSHIQATILCSKKVGLQIRTRSGGHDAEGMSYISQVPFVVVDLRNMHSIKIDVHSQTAWVEAGATLGEVYYWINEKNENLSFPGGYCPTVGVGGHFSGGGYGALMRNYGLAADNIIDAHLVNVDGKVLDRKSMGEDLFWAIRGGGGENFGIIAAWKIKLVDVPSKVTIFSVKKNMEIHGLVKLFNKWQNIAYKYDKDLVLMTHFITKNITDNHGKNKTTVHGYFSSIFHGGVDSLVDLMNKSFPELGIKKTDCKELSWIDTTIFYSGVVNFNTANFKKEILLDRSAGKKTAFSIKLDYVKKPIPETAMVKILEKLYEEDVGAGMYVLYPYGGIMEEISESAIPFPHRAGIMYELWYTASWEKQEDNEKHINWVRSVYNFTTPYVSKNPRLAYLNYRDLDLGKNNEESPNNYTQARIWGEKYFGKNFNRLVKVKTKVDPNNFFRNEQSIPPLPPHHH

SEQ ID NO: 742 - protein, 517 aa, Artificial Sequence
  Synthetic
NPRENFLKCFSKHIPNNVANPKLVYTQNDSLYSSILNSTIQNLRFTSDTTPKPLVIVTPSNVSHIQATILCSKKVGLQIRTRSGGHDAEGMSYISQVPFVVVDLRNMHSIKIDVHSQTAWVEAGATLGEVYYWINEKNENLSFPGGYCPTVGVGGHFSGGGYGALMRNYGLAADNIIDAHLVNVDGKVLDRKSMGEDLFWAIRGGGGENFGIIAAWKIKLVDVPSKVTIFSVKKNMEIHGLVKLFNKWQNIAYKYDKDLVLMTHFITKNITDNHGKNKTTVHGYFSSIFHGGVDSLVDLMNKSFPELGIKKEDCKELSWIDTTIFYSGVVNFNTANFKKEILLDRSAGKKTAFSIKLDYVKKPIPETAMVKILEKLYEEDVGAGMYVLYPYGGIMDEISESAIPFPHRAGIMYELWYTASWEKQEDNEKHINWVRSVYNFTTPYVSKNPRLAYLNYRDLDLGKNNEESPNNYTQARIWGEKYFGKNFNRLVKVKTKVDPNNFFRNEQSIPPLPPHHH

SEQ ID NO: 743 - protein, 517 aa, Artificial Sequence
  Synthetic
NPQENFLKCFSKHIPNNVANPKLVYTQNDQLYMSILNSTIQNLRFTSDTTPKPLVIVTPSNVSHIQATILCSKKVGLQIRTRSGGHDAEGMSYISQVPFVVVDLRNMHSIKIDVHSQTAWVEAGATLGEVYYWINEKNENLSFPGGYCPTVGVGGHFSGGGYGALMRNYGLAADNIIDAHLVNVDGKVLDRKSMGEDLFWAIRGGGGENFGIIAAWKIKLVPVPSKVTIFSVKKNMEIHGLVKLFNKWQNIAYKYDKDLVLMTHFITKNITDNHGKNKTTVHGYFSSIFHGGVDSLVDLMNKSFPELGIKKTDCKEMSWIDTTIFYSGVVNFNTANFKKEILLDRSAGKKTAFSIKLDYVKKPIPETAMVKILEKLYEEDVGAGMYVLYPYGGIMEEISESAIPFPHRAGIMYELWYTASWEKQEDNEKHINWVRSVYNFTTPYVSKNPRLAYLNYRDLDLGKNNEESPNNYTQARIWGEKYFGKNFNRLVKVKTKVDPNNFFRNEQSIPPLPPHHH

SEQ ID NO: 744 - protein, 517 aa, Artificial Sequence
  Synthetic
NPRENFLKCFSKHIPNNVANPKLVYTQNDQLYSSILNSTIQNLRFTSDTTPKPLVIVTPSNVSHIQATILCSKKVGLQIRTRSGGHDAEGMSYISQVPFVVVDLRNMHSIKIDVHSQTAWVEAGATLGEVYYWINEKNENLSFPGGYCPTVGVGGHFSGGGYGALMRNYGLAADNIIDAHLVNVDGKVLDRKSMGEDLFWAIRGGGGENFGIIAAWKIKLVDVPSKVTIFSVKKNMEIHGLVKLFNKWQNIAYKYDKDLVLMTHFITKNITDNHGKNKTTVHGYFSSIFHGGVDSLVDLMNKSFPELGIKKEDCKELSWIDTTIFYSGVVNFNTANFKKEILLDRSAGKKTAFSIKLDYVKKPIPETAMVKILEKLYEEDVGAGMYVLYPYGGIMEEISESAIPFPHRAGIMYELWYTASWEKQEDNEKHINWVRSVYNFTTPYVSKNPRLAYLNYRDLDLGKNNEESPNNYTQARIWGEKYFGKNFNRLVKVKTKVDPNNFFRNEQSIPPLPPHHH

SEQ ID NO: 745 - protein, 517 aa, Artificial Sequence
  Synthetic
NPRENFLKCFSKHIPNNVANPKLVYTQNDQLYSSILNSTIQNLRFTSDTTPKPLVIVTPSNVSHIQATILCSKKVGLQIRTRSGGHDAEGMSYISQVPFVVVDLRNMHSIKIDVHSQTAWVEAGATLGEVYYWINEKNENLSFPGGYCPTVGVGGHFSGGGYGALMRNYGLAADNIIDAHLVNVDGKVLDRKSMGEDLFWAIRGGGGENFGIIAAWKIKLVDVPSKVTIFSVKKNMEIHGLVKLFNKWQNIAYKYDKDLLLMTHFITKNITDNHGKNKTTVHGYFSSIFHGGVDSLVDLMNKSFPELGIKKTDCKELSWIDTTIFYSGVVNFNTANFKKEILLDRSAGKKTAFSIKLDYVKKPIPETAMVKILEKLYEEDVGAGMYVLYPYGGIMEEISESAIPFPHRAGIMYELWYTASWEKQEDNEKHINWVRSVYNFTTPYVSKNPRLAYLNYRDLDLGKNNEESPNNYTQARIWGEKYFGKNFNRLVKVKTKVDPNNFFRNEQSIPPLPPHHH

SEQ ID NO: 746 - protein, 517 aa, Artificial Sequence
  Synthetic
NPRENFLKCFSKHIPNNVANPKLVYTQNDSLYSSILNSTIQNLRFTSDTTPKPLVIVTPSNVSHIQATILCSKKVGLQIRTRSGGHDAEGMSYISQVPFVVVDLRNMHSIKIDVESQTAWVEAGATLGEVYYWINEKNENLSFPGGYCPTVGVGGHFSGGGYGALMRNYGLAADNIIDAHLVNVDGKVLDRKSMGEDLFWAIRGGGGENFGIIAAWKIKLVDVPSKVTIFSVKKNMEIHGLVKLFNKWQNIAYKYDKDLVLMTHFITKNITDNHGKNKTTVHGYFSSIFHGGVDSLVDLMNKSFPELGIKKTDCKELSWIDTTIFYSGVVNFNTANFKKEILLDRSAGKKTAFSIKLDYVKKPIPETAMVKILEKLYEEDVGAGMYVLYPYGGIMEEISESAIPFPHRAGIMYELWYTASWEKQEDNEKHINWVRSVYNFTTPYVSKNPRLAYLNYRDLDLGKNNEESPNNYTQARIWGEKYFGKNFNRLVKVKTKVDPNNFFRNEQSIPPLPPHHH

SEQ ID NO: 747 - protein, 517 aa, Artificial Sequence
  Synthetic
NPQENFLKCFSKHIPNNVTNPKLVYTQNDSLYSSILNSTIQNLRFTSDTTPKPLVIVTPSNVSHIQATILCSKKVGLQIRTRSGGHDAEGMSYISQVPFVVVDLRNMHSIKIDVESQTAWVEAGATLGEVYYWINEKNENLSFPGGYCPTVGVGGHFSGGGYGALMRNYGLAADNIIDAHLVNVDGKVLDRKSMGEDLFWAIRGGGGENFGIIAAWKIKLVPVPSKVTIFSVKKNMEIHGLVKLFNKWQNIAYKYDKDLLLMTHFITKNITDNHGKNKTTVHGYFSSIFHGGVDSLVDLMNKSFPELGIKKTDCKELSWIDTTIFYSGVVNFNTANFKKEILLDRSAGKKTAFSIKLDYVKKPIPETAMVKILEKLYEEDVGAGMYVLYPYGGIMEEISESAIPFPHRAGIMYELWYTASWEKQEDNEKHINWVRSVYNFTTPYVSKNPRLAYLNYRDLDLGKNNEESPNNYTQARIWGEKYFGKNFNRLVKVKTKVDPNNFFRNEQSIPPLPPHHH

SEQ ID NO: 748 - protein, 517 aa, Artificial Sequence
  Synthetic
NPQENFLKCFSKHIPNNVANPKLVYTQNDSLYSSILNSTIQNLRFTSDTTPKPLVIVTPSNVSHIQATILCSKKVGLQIRTRSGGHDAEGMSYISQVPFVVVDLRNMHSIKIDVESQTAWVEAGATLGEVYYWINEKNENLSFPGGYCPTVGVGGHFSGGGYGALMRNYGLAADNIIDAHLVNVDGKVLDRKSMGEDLFWAIRGGGGENFGIIAAWKIKLVPVPSKVTIFSVKKNMEIHGLVKLFNKWQNIAYKYDKDLLLMTHFITKNITDNHGKNKTTVHGYFSSIFHGGVDSLVDLMNKSFPELGIKKTDCKELSWIDTTIFYSGVVNFNTANFKKEILLDRSAGKKTAFSIKLDYVKKPIPETAMVKILEKLYEEDVGVGMYVLYPYGGIMDEISESAIPFPHRAGIMYELWYTASWEKQEDNEKHINWVRSVYNFTTPYVSKNPRLAYLNYRDLDLGKNNEESPNNYTQARIWGEKYFGKNFNRLVKVKTKVDPNNFFRNEQSIPPLPPHHH

SEQ ID NO: 749 - protein, 517 aa, Artificial Sequence
  Synthetic
NPQENFLKCFSKHIPNNVANPKLVYTQNDQLYSSILNSTIQNLRFTSDTTPKPLVIVTPSNVSHIQATILCSKKVGLQIRTRSGGHDAEGMSYISQVPFVVVDLRNMHSIKIDVHSQTAWVEAGATLGEVYYWINEKNENLSFPGGYCPTVGVGGHFSGGGYGALMRNYGLAADNIIDAHLVNVDGKVLDRKSMGEDLFWAIRGGGGENFGIIAAWKIKLVPVPSKVTIFSVKKNMEIHGLVKLFNKWQNIAYKYDKDLLLMTHFITKNITDNHGKNKTTVHGYFSSIFHGGVDSLVDLMNKSFPELGIKKTDCKELSWIDTTIFYSGVVNFNTANFKKEILLDRSAGKKTAFSIKLDYVKKPIPETAMVKILEKLYEEDVGAGMYVLYPYGGIMEEISESAIPFPHRAGIMYELWYTASWEKQEDNEKHINWVRSVYNFTTPYVSKNPRLAYLNYRDLDLGKNNEESPNNYTQARIWGEKYFGKNFNRLVKVKTKVDPNNFFRNEQSIPPLPPHHH

SEQ ID NO: 750 - protein, 517 aa, Artificial Sequence
  Synthetic
NPQENFLKCFSKHIPNNVTNPKLVYTQNDSLYSSILNSTIQNLRFTSDTTPKPLVIVTPSNVSHIQATILCSKKVGLQIRTRSGGHDAEGMSYISQVPFVIVDLRNMHSIKIDVHSQTAWVEAGATLGEVYYWINEKNENLSFPGGYCPTVGVGGHFSGGGYGALMRNYGLAADNIIDAHLVNVDGKVLDRKSMGEDLFWAIRGGGGENFGIIAAWKIKLVPVPSKVTIFSVKKNMEIHGLVKLFNKWQNIAYKYDKDLLLMTHFITKNITDNHGKNKTTVHGYFSSIFHGGVDSLVDLMNKSFPELGIKKEDCKELSWIDTTIFYSGVVNFNTANFKKEILLDRSAGKKTAFSIKLDYVKKPIPETAMVKILEKLYEEDVGAGMYVLYPYGGIMDEISESAIPFPHRAGIMYELWYTASWEKQEDNEKHINWVRSVYNFTTPYVSKNPRLAYLNYRDLDLGKNNEESPNNYTQARIWGEKYFGKNFNRLVKVKTKVDPNNFFRNEQSIPPLPPHHH

SEQ ID NO: 751 - protein, 517 aa, Artificial Sequence
  Synthetic
NPQENFLKCFSKHIPNNVANPKLVYTQNDSLYSSILNSTIQNLRFTSDTTPKPLVIVTPSNVSHIQATILCSKKVGLQIRTRSGGHDAEGMSYISQVPFVVVDLRNMHSIKIDVESQTAWVEAGATLGEVYYWINEKNENLSFPGGYCPTVGVGGHFSGGGYGALMRNYGLAADNIIDAHLVNVDGKVLDRKSMGEDLFWAIRGGGGENFGIIAAWKIKLVPVPSKVTIFSVKKNMEIHGLVKLFNKWQNIAYKYDKDLVLMTHFITKNITDNHGKNKTTVHGYFSSIFHGGVDSLVDLMNKSFPELGIKKEDCKELSWIDTTIFYSGVVNFNTANFKKEILLDRSAGKKTAFSIKLDYVKKPIPETAMVKILEKLYEEDVGAGMYVLYPYGGIMEEISESAIPFPHRAGIMYELWYTASWEKQEDNEKHINWVRSVYNFTTPYVSKNPRLAYLNYRDLDLGKNNEESPNNYTQARIWGEKYFGKNFNRLVKVKTKVDPNNFFRNEQSIPPLPPHHH

SEQ ID NO: 752 - protein, 517 aa, Artificial Sequence
  Synthetic
NPRENFLKCFSKHIPNNVTNPKLVYTQNDSLYSSILNSTIQNLRFTSDTTPKPLVIVTPSNVSHIQATILCSKKVGLQIRTRSGGHDAEGMSYISQVPFVVVDLRNMHSIKIDVESQTAWVEAGATLGEVYYWINEKNENLSFPGGYCPTVGVGGHFSGGGYGALMRNYGLAADNIIDAHLVNVDGKVLDRKSMGEDLFWAIRGGGGENFGIIAAWKIKLVDVPSKVTIFSVKKNMEIHGLVKLFNKWQNIAYKYDKDLVLMTHFITKNITDNHGKNKTTVHGYFSSIFHGGVDSLVDLMNKSFPELGIKKTDCKELSWIDTTIFYSGVVNFNTANFKKEILLDRSAGKKTAFSIKLDYVKKPIPETAMVKILEKLYEEDVGAGMYVLYPYGGIMDEISESAIPFPHRAGIMYELWYTASWEKQEDNEKHINWVRSVYNFTTPYVSKNPRLAYLNYRDLDLGKNNEESPNNYTQARIWGEKYFGKNFNRLVKVKTKVDPNNFFRNEQSIPPLPPHHH

SEQ ID NO: 753 - protein, 517 aa, Artificial Sequence
  Synthetic
NPRENFLKCFSKHIPNNVANPKLVYTQNDQLYSSILNSTIQNLRFISDTTPKPLVIVTPSNVSHIQATILCSKKVGLQIRTRSGGHDAEGMSYISQVPFVVVDLRNMHSIKIDVHSQTAWVEAGATLGEVYYWINEKNENLSFPGGYCPTVGVGGHFSGGGYGALMRNYGLAADNIIDAHLVNVDGKVLDRKSMGEDLFWAIRGGGGENFGIIAAWKIKLVDVPSKVTIFSVKKNMEIHGLVKLFNKWQNIAYKYDKDLLLMTHFITKNITDNHGKNKTTVHGYFSSIFHGGVDSLVDLMNKSFPELGIKKTDCKELSWIDTTIFYSGVVNFNTANFKKEILLDRSAGKKTAFSIKLDYVKKPIPETAMVKILEKLYEEDVGAGMYVLYPYGGIMEEISESAIPFPHRAGIMYELWYTASWEKQEDNEKHINWVRSVYNFTTPYVSKNPRLAYLNYRDLDLGKNNHESPNNYTQARIWGEKYFGKNFNRLVKVKTKVDPNNFFRNEQSIPPLPPHHH

SEQ ID NO: 754 - protein, 517 aa, Artificial Sequence
  Synthetic
NPRENFLKCFSKHIPNNVANAKLVYTQNDSLYSSILNSTIQNLRFTSDTTPKPLVIVTPSNVSHIQATILCSKKVGLQIRTRSGGHDAEGMSYISQVPFVVVDLRNMHSIKIDVESQTAWVEAGATLGEVYYWINEKNENLSFPGGYCPTVGVGGHFSGGGYGALMRNYGLAADNIIDAHLVNVDGKVLDRKSMGEDLFWAIRGGGGENFGIIAAWKIKLVDVPSKVTIFSVKKNMEIHGLVKLFNKWQNIAYKYDKDLLLMTHFITKNITDNHGKNKTTVHGYFSSIFHGGVDSLVDLMNKSFPELGIKKTDCKELSWIDTTIFYSGVVNFNTANFKKEILLDRSAGKKTAFSIKLDYVKKPIPETAMVKILEKLYEEDVGAGMYVLYPYGGIMEEISESAIPFPHRAGIMYELWYTASWEKQEDNEKHINWVRSVYNFTTPYVSKNPRLAYLNYRDLDLGKNNEESPNNYTQARIWGEKYFGKNFNRLVKVKTKVDPNNFFRNEQSIPPLPPHHH

SEQ ID NO: 755 - protein, 517 aa, Artificial Sequence
  Synthetic
NPQENFLKCFSKHIPNNVANPKLVYTQNDSLYSSILNSTIQNLRFTSDTTPKPLVIVTPSNVSHIQATILCSKKVGLQIRTRSGGHDAEGMSYISQVPFVVVDLRNMHSIKIDVHSQTAWVEAGATLGEVYYWINEKNENLSFPGGYCPTVGVGGHFSGGGYGALMRNYGLAADNIIDAHLVNVDGKVLDRKSMGEDLFWAIRGGGGENFGIIAAWKIKLVPVPSKVTIFSVKKNMEIHGLVKLFNKWQNIAYKYDKDLLLMTHFITKNITDNHGKNKTTVHGYFSSIFHGGVDSLVDLMNKSFPELGIKKTDCKELSWIDTTIFYSGVVNFNTANFKKEILLDRSAGKKTAFSIKLDYVKKPIPETAMVKILEKLYEEDVGVGMYVLYPYGGIMEEISESAIPFPHRAGIMYELWYTASWEKQEDNEKHINWVRSVYNFTTPYVSKNPRLAYLNYRDLDLGKNNEESPNNYTQARIWGEKYFGKNFNRLVKVKTKVDPNNFFRNEQSIPPLPPHHH

SEQ ID NO: 756 - protein, 517 aa, Artificial Sequence
  Synthetic
NPQENFLKCFSKHIPNNVANPKLVYTQNDSLYSSILNSTIQNLRFTSDTTPKPLVIVTPSNVSHIQATILCSKKVGLQIRTRSGGHDAEGMSYISQVPFVVVDLRNMHSIKIDVHSQTAWVEAGATLGEVYYWINEKNENLSFPGGYCPTVGVGGHFSGGGYGALMRNYGLAADNIIDAHLVNVDGKVLDRKSMGEDLFWAIRGGGGENFGIIAAWKIKLVPVPSKVTIFSVKKNMEIHGLVKLFNKWQNIAYKYDKDLLLMTHFITKNITDNHGKNKTTVHGYFSSIFHGGVDSLVDLMNKSFPELGIKKTDCKEFSWIDTTIFYSGVVNFNTANFKKEILLDRSAGKKTAFSIKLDYVKKPIPETAMVKILEKLYEEDVGAGMYVLYPYGGIMDEISESAIPFPHRAGIMYELWYTASWEKQEDNEKHINWVRSVYNFTTPYVSKNPRLAYLNYRDLDLGKNNEESPNNYTQARIWGEKYFGKNFNRLVKVKTKVDPNNFFRNEQSIPPLPPHHH

SEQ ID NO: 757 - protein, 517 aa, Artificial Sequence
  Synthetic
NPQENFLKCFSKHIPNNVANPKLVYTQNDQLYSSILNSTIQNLRFTSDTTPKPLVIVTPSNVSHIQATILCSKKVGLQIRTRSGGHDAEGMSYISQVPFVVVDLRNMHSIKIDVHSQTAWVEAGATLGEVYYWINEKNENLSFPGGYCPTVGVGGHFSGGGYGALMRNYGLAADNIIDAHLVNVDGKVLDRKSMGEDLFWAIRGGGGENFGIIAAWKIKLVPVPSKVTIFSVKKNMEIHGLVKLFNKWQNIAYKYDKDLLLMTHFITKNITDNHGKNKTTVHGYFSSIFHGGVDSLVDLMNKSFPELGIKKTDCKEFSWIDTTIFYSGVVNFNTANFKKEILLDRSAGKKTAFSIKLDYVKKPIPETAMVKILEKLYEEDVGAGMYVLYPYGGIMEEISESAIPFPHRAGIMYELWYTASWEKQEDNEKHINWVRSVYNFTTPYVSKNPRLAYLNYRDLDLGKNNEESPNNYTQARIWGEKYFGKNFNRLVKVKTKVDPNNFFRNEQSIPPLPPHHH

SEQ ID NO: 758 - protein, 517 aa, Artificial Sequence
  Synthetic
NPRENFLKCFSKHIPNNVANPKLVYTQNDSLYSSILNSTIQNLRFTSDTTPKPLVIVTPSNVSHIQATILCSKKVGLQIRTRSGGHDAEGMSYISQVPFVVVDLRNMHSIKIDVHSQTAWVEAGATLGEVYYWINEKNENLSFPGGYCPTVGVGGHFSGGGYGALMRNYGLAADNIIDAHLVNVDGKVLDRKSMGEDLFWAIRGGGGENFGIIAAWKIKLVDVPSKVTIFSVKKNMEIHGLVKLFNKWQNIAYKYDKDLLLMTHFITKNITDNHGKNKTTVHGYFSSIFHGGVDSLVDLMNKSFPELGIKKTDCKELSWIDTTIFYSGVVNFNTANFKKEILLDRSAGKKTAFSIKLDYVKKPIPETAMVKILEKLYEEDVGAGMYVLYPYGGIMDEISESAIPFPHRAGIMYELWYTASWEKQEDNEKHINWVRSVYNFTTPYVSKNPRLAYLNYRDLDLGKNNHESPNNYTQARIWGEKYFGKNFNRLVKVKTKVDPNNFFRNEQSIPPLPPHHH

SEQ ID NO: 759 - protein, 517 aa, Artificial Sequence
  Synthetic
NPRENFLKCFSKHIPNNVANPKLVYTQNDSLYSSILNSTIQNLRFTSDTTPKPLVIVTPSNVSHIQATILCSKKVGLQIRTRSGGHDAEGMSYISQVPFVVVDLRNMHSIKIDVHSQTAWVEAGATLGEVYYWINEKNENLSFPGGYCPTVGVGGHFSGGGYGALMRNYGLAADNIIDAHLVNVDGKVLDRKSMGEDLFWAIRGGGGENFGIIAAWKIKLVDVPSKVTIFSVKKNMEIHGLVKLFNKWQNIAYKYDKDLLLMTHFITKNITDNHGKNKTTVHGYFSSIFHGGVDSLVDLMNKSFPELGIKKTDCKELSWIDTTIFYSGVVNFNTANFKKEILLDRSAGKKTAFSIKLDYVKKPIPETAMVKILEKLYEEDVGAGMYVLYPYGGIMDEISESAIPFPHRAGIMYELWYTASWEKQEDNEKHINWVRSVYNFTTPYVSKNPRLAYLNYRDLDLGKNNEESPNNYTQARIWGEKYFGKNFNRLVKVKTKVDPNNFFRNEQSIPPLPPHHH

SEQ ID NO: 760 - protein, 517 aa, Artificial Sequence
  Synthetic
NPQENFLKCFSKHIPNNVANPKLVYTQNDQLYSSILNSTIQNLRFTSDTTPKPLVIVTPSNVSHIQATILCSKKVGLQIRTRSGGHDAEGMSYISQVPFVVVDLRNMHSIKIDVHSQTAWVEAGATLGEVYYWINEKNENLSFPGGYCPTVGVGGHFSGGGYGALMRNYGLAADNIIDAHLVNVDGKVLDRKSMGEDLFWAIRGGGGENFGIIAAWKIKLVPVPSKVTIFSVKKNMEIHGLVKLFNKWQNIAYKYDKDLVLMTHFITKNITDNHGKNKTTVHGYFSSIFHGGVDSLVDLMNKSFPELGIKKTDCKELSWIDTTIFYSGVVNFNTANFKKEILLDRSAGKKTAFSIKLDYVKKPIPETAMVKILEKLYEEDVGAGMYVLYPYGGIMDEISESAIPFPHRAGIMYELWYTASWEKQEDNEKHINWVRSVYNFTTPYVSKNPRLAYLNYRDLDLGKNNEESPNNYTQARIWGEKYFGKNFNRLVKVKTKVDPNNFFRNEQSIPPLPPHHH

SEQ ID NO: 761 - protein, 517 aa, Artificial Sequence
  Synthetic
NPQENFLKCFSKHIPNNVANPKLVYTQNDSLYSSILNSTIQNLRFTSDTTPKPLVIVTPSNVSHIQATILCSKKVGLQIRTRSGGHDAEGMSYISQVPFVVVDLRNMHSIKIDVHSQTAWVEAGATLGEVYYWINEKNENLSFPGGYCPTVGVGGHFSGGGYGALMRNYGLAADNIIDAHLVNVDGKVLDRKSMGEDLFWAIRGGGGENFGIIAAWKIKLVPVPSKVTIFSVKKNMEIHGLVKLFNKWQNIAYKYDKDLLLMTHFITKNITDNHGKNKTTVHGYFSSIFHGGVDSLVDLMNKSFPELGIKKTDCKEFSWIDTTIFYSGVVNFNTANFKKEILLDRSAGKKTAFSIKLDYVKKPIPETAMVKILEKLYEEDVGAGMYVLYPYGGIMEEISESAIPFPHRAGIMYELWYTASWEKQEDNEKHINWVRSVYNFTTPYVSKNPRLAYLNYRDLDLGKNNEESPNNYTQARIWGEKYFGKNFNRLVKVKTKVDPNNFFRNEQSIPPLPPHHH

SEQ ID NO: 762 - protein, 517 aa, Artificial Sequence
  Synthetic
NPRENFLKCFSKHIPNNVANPKLVYTQNDSLYSSILNSTIQNLRFTSDTTPKPLVIVTPSNVSHIQATILCSKKVGLQIRTRSGGHDAEGMSYISQVPFVVVDLRNMHSIKIDVHSQTAWVEAGATLGEVYYWINEKNENLSFPGGYCPTVGVGGHFSGGGYGALMRNYGLAADNIIDAHLVNVDGKVLDRKSMGEDLFWAIRGGGGENFGIIAAWKIKLVDVPSKVTIFSVKKNMEIHGLVKLFNKWQNIAYKYDKDLLLMTHFITKNITDNHGKNKTTVHGYFSSIFHGGVDSLVDLMNKSFPELGIKKTDCKEFSWIDTTIFYSGVVNFNTANFKKEILLDRSAGKKTAFSIKLDYVKKPIPETAMVKILEKLYEEDVGAGMYVLYPYGGIMEEISESAIPFPHRAGIMYELWYTASWEKQEDNEKHINWVRSVYNFTTPYVSKNPRLAYLNYRDLDLGKNNHESPNNYTQARIWGEKYFGKNFNRLVKVKTKVDPNNFFRNEQSIPPLPPHHH

SEQ ID NO: 763 - protein, 517 aa, Artificial Sequence
  Synthetic
NPRENFLKCFSKHIPNNVANPKLVYTQNDQLYSSILNSTIQNLRFISDTTPKPLVIVTPSNVSHIQATILCSKKVGLQIRTRSGGHDAEGMSYISQVPFVVVDLRNMHSIKIDVHSQTAWVEAGATLGEVYYWINEKNENLSFPGGYCPTVGVGGHFSGGGYGALMRNYGLAADNIIDAHLVNVDGKVLDRKSMGEDLFWAIRGGGGENFGIIAAWKIKLVDVPSKVTIFSVKKNMEIHGLVKLFNKWQNIAYKYDKDLLLMTHFITKNITDNHGKNKTTVHGYFSSIFHGGVDSLVDLMNKSFPELGIKKTDCKELSWIDTTIFYSGVVNFNTANFKKEILLDRSAGKKTAFSIKLDYVKKPIPETAMVKILEKLYEEDVGAGMYVLYPYGGIMEEISESAIPFPHRAGIMYELWYTASWEKQEDNEKHINWVRSVYNFTTPYVSKNPRLAYLNYRDLDLGKNNEESPNNYTQARIWGEKYFGKNFNRLVKVKTKVDPNNFFRNEQSIPPLPPHHH

SEQ ID NO: 764 - protein, 517 aa, Artificial Sequence
  Synthetic
NPRENFLKCFSKHIPNNVANPKLVYTQNDSLYSSILNSTIQNLRFTSDTTPKPLVIVTPSNVSHIQATILCSKKVGLQIRTRSGGHDAEGMSYISQVPFVVVDLRNMHSIKIDVESQTAWVEAGATLGEVYYWINEKNENLSFPGGYCPTVGVGGHFSGGGYGALMRNYGLAADNIIDAHLVNVDGKVLDRKSMGEDLFWAIRGGGGENFGIIAAWKIKLVDVPSKVTIFSVKKNMEIHGLVKLFNKWQNIAYKYDKDLVLMTHFITKNITDNHGKNKTTVHGYFSSIFHGGVDSLVDLMNKSFPELGIKKTDCKELSWIDTTIFYSGVVNFNTANFKKEILLDRSAGKKTAFSIKLDYVKKPIPETAMVKILEKLYEEDVGAGMYVLYPYGGIMDEISESAIPFPHRAGIMYELWYTASWEKQEDNEKHINWVRSVYNFTTPYVSKNPRLAYLNYRDLDLGKNNHESPNNYTQARIWGEKYFGKNFNRLVKVKTKVDPNNFFRNEQSIPPLPPHHH

SEQ ID NO: 765 - protein, 517 aa, Artificial Sequence
  Synthetic
NPQENFLKCFSKHIPNNVTNPKLVYTQNDSLYSSILNSTIQNLRFTSDTTPKPLVIVTPSNVSHIQATILCSKKVGLQIRTRSGGHDAEGMSYISQVPFVVVDLRNMHSIKIDVESQTAWVEAGATLGEVYYWINEKNENLSFPGGYCPTVGVGGHFSGGGYGALMRNYGLAADNIIDAHLVNVDGKVLDRKSMGEDLFWAIRGGGGENFGIIAAWKIKLVPVPSKVTIFSVKKNMEIHGLVKLFNKWQNIAYKYDKDLVLMTHFITKNITDNHGKNKTTVHGYFSSIFHGGVDSLVDLMNKSFPELGIKKEDCKELSWIDTTIFYSGVVNFNTANFKKEILLDRSAGKKTAFSIKLDYVKKPIPETAMVKILEKLYEEDVGAGMYVLYPYGGIMEEISESAIPFPHRAGIMYELWYTASWEKQEDNEKHINWVRSVYNFTTPYVSKNPRLAYLNYRDLDLGKNNEESPNNYTQARIWGEKYFGKNFNRLVKVKTKVDPNNFFRNEQSIPPLPPHHH

SEQ ID NO: 766 - protein, 517 aa, Artificial Sequence
  Synthetic
NPQENFLKCFSKHIPNNVANPKLVYTQNDQLYSSILNSTIQNLRFTSDTTPKPLVIVTPSNVSHIQATILCSKKVGLQIRTRSGGHDAEGMSYISQVPFVVVDLRNMHSIKIDVESQTAWVEAGATLGEVYYWINEKNENLSFPGGYCPTVGVGGHFSGGGYGALMRNYGLAADNIIDAHLVNVDGKVLDRKSMGEDLFWAIRGGGGENFGIIAAWKIKLVPVPSKVTIFSVKKNMEIHGLVKLFNKWQNIAYKYDKDLVLMTHFITKNITDNHGKNKTTVHGYFSSIFHGGVDSLVDLMNKSFPELGIKKEDCKELSWIDTTIFYSGVVNFNTANFKKEILLDRSAGKKTAFSIKLDYVKKPIPETAMVKILEKLYEEDVGAGMYVLYPYGGIMEEISESAIPFPHRAGIMYELWYTASWEKQEDNEKHINWVRSVYNFTTPYVSKNPRLAYLNYRDLDLGKNNEESPNNYTQARIWGEKYFGKNFNRLVKVKTKVDPNNFFRNEQSIPPLPPHHH

SEQ ID NO: 767 - protein, 517 aa, Artificial Sequence
  Synthetic
NPRENFLKCFSKHIPNNVANPKLVYTQNDQLYSSILNSTIQNLRFTSDTTPKPLVIVTPSNVSHIQATILCSKKVGLQIRTRSGGHDAEGMSYISQVPFVVVDLRNMHSIKIDVESQTAWVEAGATLGEVYYWINEKNENLSFPGGYCPTVGVGGHFSGGGYGALMRNYGLAADNIIDAHLVNVDGKVLDRKSMGEDLFWAIRGGGGENFGIIAAWKIKLVDVPSKVTIFSVKKNMEIHGLVKLFNKWQNIAYKYDKDLVLMTHFITKNITDNHGKNKTTVHGYFSSIFHGGVDSLVDLMNKSFPELGIKKTDCKELSWIDTTIFYSGVVNFNTANFKKEILLDRSAGKKTAFSIKLDYVKKPIPETAMVKILEKLYEEDVGAGMYVLYPYGGIMEEISESAIPFPHRAGIMYELWYTASWEKQEDNEKHINWVRSVYNFTTPYVSKNPRLAYLNYRDLDLGKNNEESPNNYTQARIWGEKYFGKNFNRLVKVKTKVDPNNFFRNEQSIPPLPPHHH

SEQ ID NO: 768 - protein, 517 aa, Artificial Sequence
  Synthetic
NPQENFLKCFSKHIPNNVANAKLVYTQNDSLYSSILNSTIQNLRFTSDTTPKPLVIVTPSNVSHIQATILCSKKVGLQIRTRSGGHDAEGMSYISQVPFVIVDLRNMHSIKIDVESQTAWVEAGATLGEVYYWINEKNENLSFPGGYCPTVGVGGHFSGGGYGALMRNYGLAADNIIDAHLVNVDGKVLDRKSMGEDLFWAIRGGGGENFGIIAAWKIKLVPVPSKVTIFSVKKNMEIHGLVKLFNKWQNIAYKYDKDLVLMTHFITKNITDNHGKNKTTVHGYFSSIFHGGVDSLVDLMNKSFPELGIKKEDCKELSWIDTTIFYSGVVNFNTANFKKEILLDRSAGKKTAFSIKLDYVKKPIPETAMVKILEKLYEEDVGAGMYVLYPYGGIMDEISESAIPFPHRAGIMYELWYTASWEKQEDNEKHINWVRSVYNFTTPYVSKNPRLAYLNYRDLDLGKNNEESPNNYTQARIWGEKYFGKNFNRLVKVKTKVDPNNFFRNEQSIPPLPPHHH

SEQ ID NO: 769 - protein, 517 aa, Artificial Sequence
  Synthetic
NPQENFLKCFSKHIPNNVANAKLVYTQNDSLYSSILNSTIQNLRFTSDTTPKPLVIVTPSNVSHIQATILCSKKVGLQIRTRSGGHDAEGMSYISQVPFVVVDLRNMHSIKIDVESQTAWVEAGATLGEVYYWINEKNENLSFPGGYCPTVGVGGHFSGGGYGALMRNYGLAADNIIDAHLVNVDGKVLDRKSMGEDLFWAIRGGGGENFGIIAAWKIKLVPVPSKVTIFSVKKNMEIHGLVKLFNKWQNIAYKYDKDLVLMTHFITKNITDNHGKNKTTVHGYFSSIFHGGVDSLVDLMNKSFPELGIKKEDCKELSWIDTTIFYSGVVNFNTANFKKEILLDRSAGKKTAFSIKLDYVKKPIPETAMVKILEKLYEEDVGAGMYVLYPYGGIMDEISESAIPFPHRAGIMYELWYTASWEKQEDNEKHINWVRSVYNFTTPYVSKNPRLAYLNYRDLDLGKNNEESPNNYTQARIWGEKYFGKNFNRLVKVKTKVDPNNFFRNEQSIPPLPPHHH

SEQ ID NO: 770 - protein, 517 aa, Artificial Sequence
  Synthetic
NPRENFLKCFSKHIPNNVANPKLVYTQNDQLYSSILNSTIQNLRFTSDTTPKPLVIVTPSNVSHIQATILCSKKVGLQIRTRSGGHDAEGMSYISQVPFVVVDLRNMHSIKIDVHSQTAWVEAGATLGEVYYWINEKNENLSFPGGYCPTVGVGGHFSGGGYGALMRNYGLAADNIIDAHLVNVDGKVLDRKSMGEDLFWAIRGGGGENFGIIAAWKIKLVDVPSKVTIFSVKKNMEIHGLVKLFNKWQNIAYKYDKDLLLMTHFITKNITDNHGKNKTTVHGYFSSIFHGGVDSLVDLMNKSFPELGIKKTDCKELSWIDTTIFYSGVVNFNTANFKKEILLDRSAGKKTAFSIKLDYVKKPIPETAMVKILEKLYEEDVGAGMYVLYPYGGIMEEISESAIPFPHRAGIMYELWYTASWEKQEDNEKHINWVRSVYNFTTPYVSKNPRLAYLNYRDLDLGKNNHESPNNYTQARIWGEKYFGKNFNRLVKVKTKVDPNNFFRNEQSIPPLPPHHH

SEQ ID NO: 771 - protein, 517 aa, Artificial Sequence
  Synthetic
NPQENFLKCFSKHIPNNVANAKLVYTQNDSLYSSILNSTIQNLRFTSDTTPKPLVIVTPSNVSHIQATILCSKKVGLQIRTRSGGHDAEGMSYISQVPFVVVDLRNMHSIKIDVESQTAWVEAGATLGEVYYWINEKNENLSFPGGYCPTVGVGGHFSGGGYGALMRNYGLAADNIIDAHLVNVDGKVLDRKSMGEDLFWAIRGGGGENFGIIAAWKIKLVPVPSKVTIFSVKKNMEIHGLVKLFNKWQNIAYKYDKDLVLMTHFITKNITDNHGKNKTTVHGYFSSIFHGGVDSLVDLMNKSFPELGIKKTDCKELSWIDTTIFYSGVVNFNTANFKKEILLDRSAGKKTAFSIKLDYVKKPIPETAMVKILEKLYEEDVGAGMYVLYPYGGIMEEISESAIPFPHRAGIMYELWYTASWEKQEDNEKHINWVRSVYNFTTPYVSKNPRLAYLNYRDLDLGKNNEESPNNYTQARIWGEKYFGKNFNRLVKVKTKVDPNNFFRNEQSIPPLPPHHH

SEQ ID NO: 772 - protein, 517 aa, Artificial Sequence
  Synthetic
NPRENFLKCFSKHIPNNVANPKLVYTQNDSLYSSILNSTIQNLRFTSDTTPKPLVIVTPSNVSHIQATILCSKKVGLQIRTRSGGHDAEGMSYISQVPFVVVDLRNMHSIKIDVHSQTAWVEAGATLGEVYYWINEKNENLSFPGGYCPTVGVGGHFSGGGYGALMRNYGLAADNIIDAHLVNVDGKVLDRKSMGEDLFWAIRGGGGENFGIIAAWKIKLVDVPSKVTIFSVKKNMEIHGLVKLFNKWQNIAYKYDKDLLLMTHFITKNITDNHGKNKTTVHGYFSSIFHGGVDSLVDLMNKSFPELGIKKTDCKELSWIDTTIFYSGVVNFNTANFKKEILLDRSAGKKTAFSIKLDYVKKPIPETAMVKILEKLYEEDVGAGMYVLYPYGGIMEEISESAIPFPHRAGIMYELWYTASWEKQEDNEKHINWVRSVYNFTTPYVSKNPRLAYLNYRDLDLGKNNEESPNNYTQARIWGEKYFGKNFNRLVKVKTKVDPNNFFRNEQSIPPLPPHHH

SEQ ID NO: 773 - protein, 517 aa, Artificial Sequence
  Synthetic
NPQENFLKCFSKHIPNNVTNPKLVYTQNDSLYSSILNSTIQNLRFTSDTTPKPLVIVTPSNVSHIQATILCSKKVGLQIRTRSGGHDAEGMSYISQVPFVVVDLRNMHSIKIDVESQTAWVEAGATLGEVYYWINEKNENLSFPGGYCPTVGVGGHFSGGGYGALMRNYGLAADNIIDAHLVNVDGKVLDRKSMGEDLFWAIRGGGGENFGIIAAWKIKLVPVPSKVTIFSVKKNMEIHGLVKLFNKWQNIAYKYDKDLVLMTHFITKNITDNHGKNKTTVHGYFSSIFHGGVDSLVDLMNKSFPELGIKKEDCKELSWIDTTIFYSGVVNFNTANFKKEILLDRSAGKKTAFSIKLDYVKKPIPETAMVKILEKLYEEDVGAGMYVLYPYGGIMDEISESAIPFPHRAGIMYELWYTASWEKQEDNEKHINWVRSVYNFTTPYVSKNPRLAYLNYRDLDLGKNNEESPNNYTQARIWGEKYFGKNFNRLVKVKTKVDPNNFFRNEQSIPPLPPHHH

SEQ ID NO: 774 - protein, 517 aa, Artificial Sequence
  Synthetic
NPRENFLKCFSKHIPNNVANPKLVYTQNDQLYSSILNSTIQNLRFISDTTPKPLVIVTPSNVSHIQATILCSKKVGLQIRTRSGGHDAEGMSYISQVPFVVVDLRNMHSIKIDVHSQTAWVEAGATLGEVYYWINEKNENLSFPGGYCPTVGVGGHFSGGGYGALMRNYGLAADNIIDAHLVNVDGKVLDRKSMGEDLFWAIRGGGGENFGIIAAWKIKLVDVPSKVTIFSVKKNMEIHGLVKLFNKWQNIAYKYDKDLVLMTHFITKNITDNHGKNKTTVHGYFSSIFHGGVDSLVDLMNKSFPELGIKKTDCKELSWIDTTIFYSGVVNFNTANFKKEILLDRSAGKKTAFSIKLDYVKKPIPETAMVKILEKLYEEDVGAGMYVLYPYGGIMDEISESAIPFPHRAGIMYELWYTASWEKQEDNEKHINWVRSVYNFTTPYVSKNPRLAYLNYRDLDLGKNNHESPNNYTQARIWGEKYFGKNFNRLVKVKTKVDPNNFFRNEQSIPPLPPHHH

SEQ ID NO: 775 - protein, 517 aa, Artificial Sequence
  Synthetic
NPQENFLKCFSKHIPNNVANPKLVYTQNDSLYSSILNSTIQNLRFTSDTTPKPLVIVTPSNVSHIQATILCSKKVGLQIRTRSGGHDAEGMSYISQVPFVVVDLRNMHSIKIDVHSQTAWVEAGATLGEVYYWINEKNENLSFPGGYCPTVGVGGHFSGGGYGALMRNYGLAADNIIDAHLVNVDGKVLDRKSMGEDLFWAIRGGGGENFGIIAAWKIKLVPVPSKVTIFSVKKNMEIHGLVKLFNKWQNIAYKYDKDLVLMTHFITKNITDNHGKNKTTVHGYFSSIFHGGVDSLVDLMNKSFPELGIKKEDCKEFSWIDTTIFYSGVVNFNTANFKKEILLDRSAGKKTAFSIKLDYVKKPIPETAMVKILEKLYEEDVGAGMYVLYPYGGIMEEISESAIPFPHRAGIMYELWYTASWEKQEDNEKHINWVRSVYNFTTPYVSKNPRLAYLNYRDLDLGKNNEESPNNYTQARIWGEKYFGKNFNRLVKVKTKVDPNNFFRNEQSIPPLPPHHH

SEQ ID NO: 776 - protein, 517 aa, Artificial Sequence
  Synthetic
NPQENFLKCFSKHIPNNVTNPKLVYTQNDSLYSSILNSTIQNLRFTSDTTPKPLVIVTPSNVSHIQATILCSKKVGLQIRTRSGGHDAEGMSYISQVPFVIVDLRNMHSIKIDVESQTAWVEAGATLGEVYYWINEKNENLSFPGGYCPTVGVGGHFSGGGYGALMRNYGLAADNIIDAHLVNVDGKVLDRKSMGEDLFWAIRGGGGENFGIIAAWKIKLVPVPSKVTIFSVKKNMEIHGLVKLFNKWQNIAYKYDKDLLLMTHFITKNITDNHGKNKTTVHGYFSSIFHGGVDSLVDLMNKSFPELGIKKTDCKELSWIDTTIFYSGVVNFNTANFKKEILLDRSAGKKTAFSIKLDYVKKPIPETAMVKILEKLYEEDVGAGMYVLYPYGGIMDEISESAIPFPHRAGIMYELWYTASWEKQEDNEKHINWVRSVYNFTTPYVSKNPRLAYLNYRDLDLGKNNEESPNNYTQARIWGEKYFGKNFNRLVKVKTKVDPNNFFRNEQSIPPLPPHHH

SEQ ID NO: 777 - protein, 517 aa, Artificial Sequence
  Synthetic
NPRENFLKCFSKHIPNNVANPKLVYTQNDQLYSSILNSTIQNLRFISDTTPKPLVIVTPSHVSHIQATILCAKKVGLQIRTRSGGHDAEGMSYISQVPFVVVDLRNMHSIKIDVHSQTAWVQAGATLGEVYYWINEKNENLSFPGGYCPTVGVGGHFSGGGYGALMRKYGLAADNIIDAHLVDVDGKVLDRKSMGEDLFWAIRGGGGENFGIIAAWKIKLVDVPSKVTIFSVKKNMEIHGLVKLFNKWQNIAYKYDKDLVLMTHFITKNITDNHGKNKTTVHGYFSSIFHGGVDSLVDLMNKSFPELGIKKTDCKEMSWIDTTIFYSGVVNFNTANFKKEILLDRSAGKKTAFSIKLDYVKKPIPETAMVKILEKLYEEDVGAGMYVLYPYGGIMEEISESAIPFPHRAGIMYEIWYTASWEKQEDNEKHINWVRSVYNFTTPYVSKNPRLAYLNYRDLDLGKNNHESPNNYTQARIWGEKYFGKNFNRLVKVKTKVDPNNFFRNEQSIPPLPPHHH

SEQ ID NO: 778 - protein, 517 aa, Artificial Sequence
  Synthetic
NPQENFLKCFSKHIPNNVANAKLVYTQNDSLYSSILNSTIQNLRFTSDTTPKPLVIVTPSNVSHIQATILCSKKVGLQIRTRSGGHDAEGMSYISQVPFVVVDLRNMHSIKIDVESQTAWVEAGATLGEVYYWINEKNENLSFPGGYCPTVGVGGHFSGGGYGALMRNYGLAADNIIDAHLVNVDGKVLDRKSMGEDLFWAIRGGGGENFGIIAAWKIKLVPVPSKVTIFSVKKNMEIHGLVKLFNKWQNIAYKYDKDLLLMTHFITKNITDNHGKNKTTVHGYFSSIFHGGVDSLVDLMNKSFPELGIKKEDCKELSWIDTTIFYSGVVNFNTANFKKEILLDRSAGKKTAFSIKLDYVKKPIPETAMVKILEKLYEEDVGAGMYVLYPYGGIMDEISESAIPFPHRAGIMYELWYTASWEKQEDNEKHINWVRSVYNFTTPYVSKNPRLAYLNYRDLDLGKNNEESPNNYTQARIWGEKYFGKNFNRLVKVKTKVDPNNFFRNEQSIPPLPPHHH

SEQ ID NO: 779 - protein, 517 aa, Artificial Sequence
  Synthetic
NPQENFLKCFSKHIPNNVANPKLVYTQNDSLYSSILNSTIQNLRFTSDTTPKPLVIVTPSNVSHIQATILCSKKVGLQIRTRSGGHDAEGMSYISQVPFVVVDLRNMHSIKIDVHSQTAWVEAGATLGEVYYWINEKNENLSFPGGYCPTVGVGGHFSGGGYGALMRNYGLAADNIIDAHLVNVDGKVLDRKSMGEDLFWAIRGGGGENFGIIAAWKIKLVPVPSKVTIFSVKKNMEIHGLVKLFNKWQNIAYKYDKDLVLMTHFITKNITDNHGKNKTTVHGYFSSIFHGGVDSLVDLMNKSFPELGIKKTDCKEFSWIDTTIFYSGVVNFNTANFKKEILLDRSAGKKTAFSIKLDYVKKPIPETAMVKILEKLYEEDVGAGMYVLYPYGGIMEEISESAIPFPHRAGIMYELWYTASWEKQEDNEKHINWVRSVYNFTTPYVSKNPRLAYLNYRDLDLGKNNEESPNNYTQARIWGEKYFGKNFNRLVKVKTKVDPNNFFRNEQSIPPLPPHHH

SEQ ID NO: 780 - protein, 517 aa, Artificial Sequence
  Synthetic
NPQENFLKCFSKHIPNNVANAKLVYTQNDSLYSSILNSTIQNLRFTSDTTPKPLVIVTPSNVSHIQATILCSKKVGLQIRTRSGGHDAEGMSYISQVPFVVVDLRNMHSIKIDVHSQTAWVEAGATLGEVYYWINEKNENLSFPGGYCPTVGVGGHFSGGGYGALMRNYGLAADNIIDAHLVNVDGKVLDRKSMGEDLFWAIRGGGGENFGIIAAWKIKLVPVPSKVTIFSVKKNMEIHGLVKLFNKWQNIAYKYDKDLVLMTHFITKNITDNHGKNKTTVHGYFSSIFHGGVDSLVDLMNKSFPELGIKKTDCKEFSWIDTTIFYSGVVNFNTANFKKEILLDRSAGKKTAFSIKLDYVKKPIPETAMVKILEKLYEEDVGAGMYVLYPYGGIMEEISESAIPFPHRAGIMYELWYTASWEKQEDNEKHINWVRSVYNFTTPYVSKNPRLAYLNYRDLDLGKNNEESPNNYTQARIWGEKYFGKNFNRLVKVKTKVDPNNFFRNEQSIPPLPPHHH

SEQ ID NO: 781 - protein, 517 aa, Artificial Sequence
  Synthetic
NPQENFLKCFSKHIPNNVANPKLVYTQNDSLYSSILNSTIQNLRFTSDTTPKPLVIVTPSNVSHIQATILCSKKVGLQIRTRSGGHDAEGMSYISQVPFVVVDLRNMHSIKIDVESQTAWVEAGATLGEVYYWINEKNENLSFPGGYCPTVGVGGHFSGGGYGALMRNYGLAADNIIDAHLVNVDGKVLDRKSMGEDLFWAIRGGGGENFGIIAAWKIKLVPVPSKVTIFSVKKNMEIHGLVKLFNKWQNIAYKYDKDLLLMTHFITKNITDNHGKNKTTVHGYFSSIFHGGVDSLVDLMNKSFPELGIKKEDCKELSWIDTTIFYSGVVNFNTANFKKEILLDRSAGKKTAFSIKLDYVKKPIPETAMVKILEKLYEEDVGVGMYVLYPYGGIMDEISESAIPFPHRAGIMYELWYTASWEKQEDNEKHINWVRSVYNFTTPYVSKNPRLAYLNYRDLDLGKNNEESPNNYTQARIWGEKYFGKNFNRLVKVKTKVDPNNFFRNEQSIPPLPPHHH

SEQ ID NO: 782 - protein, 517 aa, Artificial Sequence
  Synthetic
NPQENFLKCFSKHIPNNVANPKLVYTQNDQLYSSILNSTIQNLRFTSDTTPKPLVIVTPSNVSHIQATILCSKKVGLQIRTRSGGHDAEGMSYISQVPFVVVDLRNMHSIKIDVESQTAWVEAGATLGEVYYWINEKNENLSFPGGYCPTVGVGGHFSGGGYGALMRNYGLAADNIIDAHLVNVDGKVLDRKSMGEDLFWAIRGGGGENFGIIAAWKIKLVPVPSKVTIFSVKKNMEIHGLVKLFNKWQNIAYKYDKDLLLMTHFITKNITDNHGKNKTTVHGYFSSIFHGGVDSLVDLMNKSFPELGIKKTDCKELSWIDTTIFYSGVVNFNTANFKKEILLDRSAGKKTAFSIKLDYVKKPIPETAMVKILEKLYEEDVGAGMYVLYPYGGIMEEISESAIPFPHRAGIMYELWYTASWEKQEDNEKHINWVRSVYNFTTPYVSKNPRLAYLNYRDLDLGKNNEESPNNYTQARIWGEKYFGKNFNRLVKVKTKVDPNNFFRNEQSIPPLPPHHH

SEQ ID NO: 783 - protein, 517 aa, Artificial Sequence
  Synthetic
NPRENFLKCFSKHIPNNVANPKLVYTQNDSLYSSILNSTIQNLRFTSDTTPKPLVIVTPSNVSHIQATILCSKKVGLQIRTRSGGHDAEGMSYISQVPFVVVDLRNMHSIKIDVHSQTAWVEAGATLGEVYYWINEKNENLSFPGGYCPTVGVGGHFSGGGYGALMRNYGLAADNIIDAHLVNVDGKVLDRKSMGEDLFWAIRGGGGENFGIIAAWKIKLVDVPSKVTIFSVKKNMEIHGLVKLFNKWQNIAYKYDKDLLLMTHFITKNITDNHGKNKTTVHGYFSSIFHGGVDSLVDLMNKSFPELGIKKEDCKELSWIDTTIFYSGVVNFNTANFKKEILLDRSAGKKTAFSIKLDYVKKPIPETAMVKILEKLYEEDVGAGMYVLYPYGGIMDEISESAIPFPHRAGIMYELWYTASWEKQEDNEKHINWVRSVYNFTTPYVSKNPRLAYLNYRDLDLGKNNEESPNNYTQARIWGEKYFGKNFNRLVKVKTKVDPNNFFRNEQSIPPLPPHHH

SEQ ID NO: 784 - protein, 516 aa, Artificial Sequence
  Synthetic
NPRENFLKCFSQYIPNNATNLKLVYTQNNPLYMSVLNSTIHNLRFTSDTTPKPLVIVTPSHVSHIQATILCSKKVGLQIRTRSGGHDSEGMSYISQVPFVIVDLRNMRSIKIDVHSQTAWVEAGATLGEVYYWVNEKNENLSLAAGYCPTVCAGGHFGGGGYGPLMRKYGLAADNIIDAHLVNVHGKVLDRKSMGEDLFWALRGGGAESFGIIVAWKIRLVAVPKSTMFSVKKIMEIHELVKLVNKWQNIAYKYDKDLLLMTHFITRNITDNQGKNKTAIHTYFSSVFLGGVDSLVDLMNKSFPELGIKKEDCRELSWIDTIIFYSGVVNYDTDNFNKEILLDRSAGQNGAFKIKLDYVKKPIPESVFVQILEKLYEEDIGAGMYVLYPYGGIMDEISESAIPFPHRAGILYELWYICSWEKQEDNEKHLNWIRNIYNFMTPYVSKNPRLAYLNYRDLDIGINDPKNPNNYTQARIWGEKYFGKNFDRLVKVKTLVDPNNFFRNEQSIPPLPRHRH

SEQ ID NO: 785 - protein, 517 aa, Artificial Sequence
  Synthetic
NPRENFLKCFSKHIPNNVANPKLVYTQNDSLYSSILNSTIQNLRFISDTTPKPLVIVTPSNVSHIQATILCSKKVGLQIRTRSGGHDAEGMSYISQVPFVVVDLRNMHSIKIDVHSQTAWVEAGATLGEVYYWINEKNENLSFPGGYCPTVGVGGHFSGGGYGALMRNYGLAADNIIDAHLVNVDGKVLDRKSMGEDLFWAIRGGGGENFGIIAAWKIKLVDVPSKVTIFSVKKNMEIHGLVKLFNKWQNIAYKYDKDLVLMTHFITKNITDNHGKNKTTVHGYFSSIFHGGVDSLVDLMNKSFPELGIKKEDCKELSWIDTTIFYSGVVNFNTANFKKEILLDRSAGKKTAFSIKLDYVKKPIPETAMVKILEKLYEEDVGAGMYVLYPYGGIMEEISESAIPFPHRAGIMYELWYTASWEKQEDNEKHINWVRSVYNFTTPYVSKNPRLAYLNYRDLDLGKNNHESPNNYTQARIWGEKYFGKNFNRLVKVKTKVDPNNFFRNEQSIPPLPPHHH

SEQ ID NO: 786 - protein, 516 aa, Artificial Sequence
  Synthetic
NPRENFLKCFSQYIPNNATNLKLVYTQNNPLYMSVLNSTIHNLRFTSDTTPKPLVIVTPSHVSHIQATILCSKKVGLQIRTRSGGHDSEGMSYISQVPFVIVDLRNMRSIKIDVHSQTAWVQAGATLGEVYYWINEKNENLSLAAGYCPTVGAGGHFGGGGYGPLMRKYGLAADNIIDAHLVDVHGKVLDRKSMGEDLFWALRGGGAESFGIIVAWKIRLVAVPKSTMFSVKKIMEIHELVKLVHKWQNIAYKYDKDLLLMTHFITRNITDNQGKNKTAIHTYFSSVFLGGVDSLVDLMNKSFPELGIKKEDCRELSWIDTIIFYSGVVNYDTDNFNKEILLDRSAGQNGAFKIKLDYVKKPIPESVFVQILEKLYEEDIGAGMYVLYPYGGIMDEISESAIPFPHRAGILYELWYICSWEKQEDNEKHLNWIRNIYNFMTPYVSKNPRLAYLNYRDLDIGINDPKNPNNYTQARIWGEKYFGKNFDRLVKVKTLVDPNNFFRNEQSIPPLPRHRH

SEQ ID NO: 787 - protein, 517 aa, Artificial Sequence
  Synthetic
NPQENFLKCFSKHIPNNVANPKLVYTQNDQLYMSILNSTIQNLRFTSDTTPKPLVIVTPSNVSHIQATILCSKKVGLQIRTRSGGHDAEGMSYISQVPFVVVDLRNMHSIKIDVHSQTAWVEAGATLGEVYYWINEKNENLSFPGGYCPTVGVGGHFSGGGYGALMRNYGLAADNIIDAHLVNVDGKVLDRKSMGEDLFWAIRGGGGENFGIIAAWKIKLVPVPSKVTIFSVKKNMEIHGLVKLFNKWQNIAYKYDKDLVLMTHFITKNITDNHGKNKTTVHGYFSSIFHGGVDSLVDLMNKSFPELGIKKEDCKELSWIDTTIFYSGVVNFNTANFKKEILLDRSAGKKTAFSIKLDYVKKPIPETAMVKILEKLYEEDVGAGMYVLYPYGGIMEEISESAIPFPHRAGIMYELWYTASWEKQEDNEKHINWVRSVYNFTTPYVSKNPRLAYLNYRDLDLGKNNEESPNNYTQARIWGEKYFGKNFNRLVKVKTKVDPNNFFRNEQSIPPLPPHHH

SEQ ID NO: 788 - protein, 517 aa, Artificial Sequence
  Synthetic
NPQENFLKCFSKHIPNNVANPKLVYTQNDSLYSSILNSTIQNLRFTSDTTPKPLVIVTPSNVSHIQATILCSKKVGLQIRTRSGGHDAEGMSYISQVPFVVVDLRNMHSIKIDVESQTAWVEAGATLGEVYYWINEKNENLSFPGGYCPTVGVGGHFSGGGYGALMRNYGLAADNIIDAHLVNVDGKVLDRKSMGEDLFWAIRGGGGENFGIIAAWKIKLVPVPSKVTIFSVKKNMEIHGLVKLFNKWQNIAYKYDKDLVLMTHFITKNITDNHGKNKTTVHGYFSSIFHGGVDSLVDLMNKSFPELGIKKTDCKEFSWIDTTIFYSGVVNFNTANFKKEILLDRSAGKKTAFSIKLDYVKKPIPETAMVKILEKLYEEDVGAGMYVLYPYGGIMEEISESAIPFPHRAGIMYELWYTASWEKQEDNEKHINWVRSVYNFTTPYVSKNPRLAYLNYRDLDLGKNNEESPNNYTQARIWGEKYFGKNFNRLVKVKTKVDPNNFFRNEQSIPPLPPHHH

SEQ ID NO: 789 - protein, 517 aa, Artificial Sequence
  Synthetic
NPQENFLKCFSKHIPNNVANPKLVYTQNDQLYSSILNSTIQNLRFTSDTTPKPLVIVTPSNVSHIQATILCSKKVGLQIRTRSGGHDAEGMSYISQVPFVVVDLRNMHSIKIDVESQTAWVEAGATLGEVYYWINEKNENLSFPGGYCPTVGVGGHFSGGGYGALMRNYGLAADNIIDAHLVNVDGKVLDRKSMGEDLFWAIRGGGGENFGIIAAWKIKLVPVPSKVTIFSVKKNMEIHGLVKLFNKWQNIAYKYDKDLLLMTHFITKNITDNHGKNKTTVHGYFSSIFHGGVDSLVDLMNKSFPELGIKKTDCKELSWIDTTIFYSGVVNFNTANFKKEILLDRSAGKKTAFSIKLDYVKKPIPETAMVKILEKLYEEDVGAGMYVLYPYGGIMDEISESAIPFPHRAGIMYELWYTASWEKQEDNEKHINWVRSVYNFTTPYVSKNPRLAYLNYRDLDLGKNNEESPNNYTQARIWGEKYFGKNFNRLVKVKTKVDPNNFFRNEQSIPPLPPHHH

SEQ ID NO: 790 - protein, 516 aa, Artificial Sequence
  Synthetic
NPRENFLKCFSQYIPNNATNLKLVYTQNNPLYMSVLNSTIHNLRFTSDTTPKPLVIVTPSHVSHIQATILCSKKVGLQIRTRSGGHDAEGMSYISQVPFVIVDLRNMRSIKIDVHSQTAWVEAGATLGEVYYWVNEKNENLSLAAGYCPTVCAGGHFGGGGYGPLMRNYGLAADNIIDAHLVNVHGKVLDRKSMGEDLFWALRGGGAESFGIIVAWKIRLVAVPKSTMFSVKKIMEIHELVKLVNKWQNIAYKYDKDLLLMTHFITRNITDNQGKNKTAIHTYFSSVFLGGVDSLVDLMNKSFPELGIKKEDCRELSWIDTIIFYSGVVNYDTDNFNKEILLDRSAGQNGAFKIKLDYVKKPIPESVFVQILEKLYEEDIGAGMYVLYPYGGIMDEISESAIPFPHRAGILYELWYICSWEKQEDNEKHLNWIRNIYNFMTPYVSKNPRLAYLNYRDLDIGINDPKNPNNYTQARIWGEKYFGKNFDRLVKVKTLVDPDNFFRNEQSIPPLPRHRH

SEQ ID NO: 791 - protein, 516 aa, Artificial Sequence
  Synthetic
NPRENFLKCFSQYIPNNATNLKLVYTQNNPLYMSVLNSTIHNLRFTSDTTPKPLVIVTPSHVSHIQATILCSKKVGLQIRTRSGGHDSEGMSYISQVPFVIVDLRNMRSIKIDVHSQTAWVEAGATLGEVYYWVNEKNENLSLAAGFCPTVCAGGHFGGGGYGPLMRNYGLAADNIIDAHLVNVHGKVLDRKSMGEDLFWALRGGGAESFGIIVAWKIRLVAVPKSTMFSVKKIMEIHELVKLVNKWQNIAYKYDKDLLLMTHFITRNITDNQGKNKTAIHTYFSSVFLGGVDSLVDLMNKSFPELGIKKEDCRELSWIDTIIFYSGVVNYDTDNFNKEILLDRSAGQNGAFKIKLDYVKKPIPESVFVQILEKLYEEDIGAGMYVLYPYGGIMDEISESAIPFPHRAGILYELWYICSWEKQEDNEKHLNWIRNIYNFMTPYVSKNPRLAYLNYRDLDIGINDPKNPNNYTQARIWGEKYFGKNFDRLVKVKTLVDPNNFFRNEQSIPPLPRHRH

SEQ ID NO: 792 - protein, 516 aa, Artificial Sequence
  Synthetic
NPRENFLKCFSQYIPNNATNLKLVYTQNNPLYMSVLNSTIHNLRFTSDTTPKPLVIVTPSHVSHIQATILCSKKVGLQIRTRSGGHDSEGMSYISQVPFVIVDLRNMRSIKIDVHSQTAWVEAGATLGEVYYWVNEKNENLSLAAGYCPTVCAGGHFGGGGYGPLMRNYGLAADNIIDAHLVNVNGKVLDRKSMGEDLFWALRGGGAESFGIIVAWKIRLVAVPKSTMFSVKKIMEIHELVKLVNKWQNIAYKYDKDLLLMTHFITRNITDNQGKNKTAIHTYFSSVFLGGVDSLVDLMNKSFPELGIKKEDCREMSWIDTIIFYSGVVNYDTDNFNKEILLDRSAGQNGAFKIKLDYVKKPIPESVFVQILEKLYEEDIGAGMYVLYPYGGIMDEISESAIPFPHRAGILYELWYICSWEKQEDNEKHLNWIRNIYNFMTPYVSKNPRLAYLNYRDLDIGINDPKNPNNYTQARIWGEKYFGKNFDRLVKVKTLVDPDNFFRNEQSIPPLPRHRH

SEQ ID NO: 793 - protein, 517 aa, Artificial Sequence
  Synthetic
NPQENFLKCFSKHIPNNVANPKLIYTQNDQLYSSILNSTIQNLRFTSDTTPKPLVIVTPSNVSHIQATILCSKKVGLQIRTRSGGHDAEGMSYISQVPFVVVDLRNMHSIKIDVHSQTAWVEAGATLGEVYYWINEKNENLSFPGGYCPTVGVGGHFSGGGYGALMRNYGLAADNIIDAHLVNVDGKVLDRKSMGEDLFWAIRGGGGENFGIIAAWKIKLVPVPSKVTIFSVKKNMEIHGLVKLFNKWQNIAYKYDKDLVLMTHFITKNITDNHGKNKTTVHGYFSSIFHGGVDSLVDLMNKSFPELGIKKTDCKEFSWIDTTIFYSGVVNFNTANFKKEILLDRSAGKKTAFSIKLDYVKKPIPETAMVKILEKLYEEDVGAGMYVLYPYGGIMEEISESAIPFPHRAGIMYELWYTASWEKQEDNEKHINWVRSVYNFTTPYVSKNPRLAYLNYRDLDLGKNNEESPNNYTQARIWGEKYFGKNFNRLVKVKTKVDPNNFFRNEQSIPPLPPHHH

SEQ ID NO: 794 - protein, 516 aa, Artificial Sequence
  Synthetic
NPRENFLKCFSQYIPNNATNLKLVYTQNNPLYMSVLNSTIHNLRFTSDTTPKPLVIVTPSHVSHIQATILCSKKVGLQIRTRSGGHDAEGMSYISQVPFVIVDLRNMRSIKIDVHSQTAWVEAGATLGEVYYWVNEKNENLSLAAGYCPTVCAGGHFGGGGYGPLMRNYGLAADNIIDAHLVNVHGKVLDRKSMGEDLFWALRGGGAESFGIIVAWKIRLVAVPKSTMFSVKKIMEIHELVKLVNKWQNIAYKYDKDLLLMTHFITRNITDNQGKNKTAIHTYFSSVFLGGVDSLVDLMNKSFPELGIKKEDCREMSWIDTIIFYSGVVNYDTDNFNKEILLDRSAGQNGAFKIKLDYVKKPIPESVFVQILEKLYEEDIGAGMYVLYPYGGIMDEISESAIPFPHRAGILYELWYICSWEKQEDNEKHLNWIRNIYNFMTPYVSKNPRLAYLNYRDLDIGINDPKNPNNYTQARIWGEKYFGKNFDRLVKVKTLVDPDNFFRNEQSIPPLPRHRH

SEQ ID NO: 795 - protein, 516 aa, Artificial Sequence
  Synthetic
NPRENFLKCFSQYIPNNATNLKLVYTQNNPLYMSVLNSTIHNLRFTSDTTPKPLVIVTPSHVSHIQGTILCSKKVGLQIRTRSGGHDAEGMSYISQVPFVIVDLRNMRSIKIDVHSQTAWVEAGATLGEVYYWVNEKNENLSLAAGYCPTVCAGGHFGGGGYGPLMRNYGLAADNIIDAHLVNVNGKVLDRKSMGEDLFWALRGGGAESFGIIVAWKIRLVAVPKSTMFSVKKIMEIHELVKLVNKWQNIAYKYDKDLLLMTHFITRNITDNQGKNKTAIHTYFSSVFLGGVDSLVDLMNKSFPELGIKKEDCREMSWIDTIIFYSGVVNYDTDNFNKEILLDRSAGQNGAFKIKLDYVKKPIPESVFVQILEKLYEEDIGAGMYALYPYGGIMDEISESAIPFPHRAGILYELWYICSWEKQEDNEKHLNWIRNIYNFMTPYVSKNPRLAYLNYRDLDIGINDPKNPNNYTQARIWGEKYFGKNFDRLVKVKTLVDPDNFFRNEQSIPPLPRHRH

SEQ ID NO: 796 - protein, 517 aa, Artificial Sequence
  Synthetic
NPQENFLKCFSKHIPNNVANAKLVYTQNDSLYSSILNSTIQNLRFTSDTTPKPLVIVTPSNVSHIQATILCSKKVGLQIRTRSGGHDAEGMSYISQVPFVVVDLRNMHSIKIDVHSQTAWVEAGATLGEVYYWINEKNENLSFPGGYCPTVGVGGHFSGGGYGALMRNYGLAADNIIDAHLVNVDGKVLDRKSMGEDLFWAIRGGGGENFGIIAAWKIKLVPVPSKVTIFSVKKNMEIHGLVKLFNKWQNIAYKYDKDLLLMTHFITKNITDNHGKNKTTVHGYFSSIFHGGVDSLVDLMNKSFPELGIKKTDCKELSWIDTTIFYSGVVNFNTANFKKEILLDRSAGKKTAFSIKLDYVKKPIPETAMVKILEKLYEEDVGAGMYVLYPYGGIMDEISESAIPFPHRAGIMYELWYTASWEKQEDNEKHINWVRSVYNFTTPYVSKNPRLAYLNYRDLDLGKNNEESPNNYTQARIWGEKYFGKNFNRLVKVKTKVDPNNFFRNEQSIPPLPPHHH

SEQ ID NO: 797 - protein, 517 aa, Artificial Sequence
  Synthetic
NPRENFLKCFSKHIPNNVANAKLVYTQNDSLYSSILNSTIQNLRFTSDTTPKPLVIVTPSNVSHIQATILCSKKVGLQIRTRSGGHDAEGMSYISQVPFVVVDLRNMHSIKIDVESQTAWVEAGATLGEVYYWINEKNENLSFPGGYCPTVGVGGHFSGGGYGALMRNYGLAADNIIDAHLVNVDGKVLDRKSMGEDLFWAIRGGGGENFGIIAAWKIKLVDVPSKVTIFSVKKNMEIHGLVKLFNKWQNIAYKYDKDLVLMTHFITKNITDNHGKNKTTVHGYFSSIFHGGVDSLVDLMNKSFPELGIKKEDCKELSWIDTTIFYSGVVNFNTANFKKEILLDRSAGKKTAFSIKLDYVKKPIPETAMVKILEKLYEEDVGAGMYVLYPYGGIMEEISESAIPFPHRAGIMYELWYTASWEKQEDNEKHINWVRSVYNFTTPYVSKNPRLAYLNYRDLDLGKNNEESPNNYTQARIWGEKYFGKNFNRLVKVKTKVDPNNFFRNEQSIPPLPPHHH

SEQ ID NO: 798 - protein, 516 aa, Artificial Sequence
  Synthetic
NPRENFLKCFSQYIPNNATNLKLVYTQNNPLYMSVLNSTIHNLRFTSDTTPKPLVIVTPSHVSHIQATILCSKKVGLQIRTRSGGHDAEGMSYISQVPFVIVDLRNMRSIKIDVHSQTAWVEAGATLGEVYYWVNEKNENLSLAAGYCPTVCAGGHFGGGGYGPLMRNYGLAADNIIDAHLVNVNGKVLDRKSMGEDLFWALRGGGAESFGIIVAWKIRLVAVPKSTMFSVKKIMEIHELVKLVNKWQNIAYKYDKDLLLMTHFITRNITDNQGKNKTAIHTYFSSVFLGGVDSLVDLMNKSFPELGIKKEDCREMSWIDTIIFYSGVVNYDTDNFNKEILLDRSAGQNGAFKIKLDYVKKPIPESVFVQILEKLYEEDIGAGMYVLYPYGGIMDEISESAIPFPHRAGILYELWYICSWEKQEDNEKHLNWIRNIYNFMTPYVSKNPRLAYLNYRDLDIGINDPKNPNNYTQARIWGEKYFGKNFDRLVKVKTLVDPDNFFRNEQSIPPLPRHRH

SEQ ID NO: 799 - protein, 516 aa, Artificial Sequence
  Synthetic
NPRENFLKCFSQYIPNNATNLKLVYTQNNPLYMSVLNSTIHNLRFTSDTTPKPLVIVTPSHVSHIQATILCSKKVGLQIRTRSGGHDSEGMSYISQVPFVIVDLRNMRSIKIDVHSQTAWVEAGATLGEVYYWVNEKNENLSLAAGYCPTVCAGGHFGGGGYGPLMRNYGLAADNIIDAHLVNVHGKVLDRKSMGEDLFWALRGGGAESFGIIVAWKIRLVAVPKSTMFSVKKIMEIHELVKLVNKWQNIAYKYDKDLLLMTHFITRNITDNQGKNKTAIHTYFSSVFLGGVDSLVDLMNKSFPELGIKKEDCRELSWIDTIIFMSGVVNYDTDNFNKEILLDRSAGQNGAFKIKLDYVKKPIPESVFVQILEKLYEEDIGAGMYVLYPYGGIMDEISESAIPFPHRAGILYELWYICSWEKQEDNEKHLNWIRNIYNFMTPYVSKNPRLAYLNYRDLDIGINDPKNPNNYTQARIWGEKYFGKNFDRLVKVKTLVDPNNFFRNEQSIPPLPRHRH

SEQ ID NO: 800 - protein, 516 aa, Artificial Sequence
  Synthetic
NPRENFLKCFSQYIPNNATNLNLVYTQNNPLYMSVLNSTIHNLRFTSDTTPKPLVIVTPSHVSHIQATILCSKKHGLQIRTRSGGHDSEGMSYISQVPFVIVDLRNMRSIKIDVHSQTAWVQAGATLGEVYYWINEKNENLSLAAGYCPTVGAGGHFGGGGYGPLMRKYGLAADNIIDAHLVDVNGKVLDRKSMGEDLFWALRGGGAESFGIIVAWKIRLVAVPKSTMFSVKKIMEIHELVKLVNKWQNIAYKYDKDLLLMTHFITRNITDNQGKNKTAIHTYFSSVFLGGVDSLVDLMNKSFPELGIKKEDCREMSWIDTIIFYSGVVNYDTDNFNKEILLDRSAGQNGAFKIKLDYVKKPIPESVFVQILEKLYEEDIGAGMYVLYPYGGIMDEISESAIPFPHRAGILYELWYICSWEKQEDNEKHLNWIRNIYNFMTPYVSKNPRLAYLNYRDLDIGINDPKNPNNYTQARIWGEKYFGKNFDRLVKVKTLVDPNNFFRNEQSIPPLPRHRH

SEQ ID NO: 801 - protein, 516 aa, Artificial Sequence
  Synthetic
NPRENFLKCFSQYIPNNATNLKLVYTQNNPLYMSVLNSTIHNLRFTSDTTPKPLVIVTPSHVSHIQATILCSKKVGLQIRTRSGGHDSEGMSYISQVPFVIVDLRNMRSIKIDVHSQTAWVEAGATLGEVYYWVNEKNENLSLAAGYCPTVCAGGHFGGGGYGPLMRNYGLAADNIIDAHLVNVHGKVLDRKSMGEDLFWALRGGGAESFGIIVAWKIRLVAVPKSTMFSVKKIMEIHELVKLVNKWQNIAYKYDKDLLLMTHFITRNITDNQGKNKTAIHTYFSSVFLGGVDSLVDLMNKSFPELGIKKEDCRELSWIDTIIFYSGVVNYDTDNFNKEILLDRSAGQNGAFKIKLDYVKKPIPESVFVQILEKLYEEDIGAGMYVLYPYGGIMDEISESAIPFPHRAGILYEIWYICSWEKQEDNEKHLNWIRNIYNFMTPYVSKNPRLAYLNYRDLDIGINDPKNPNNYTQARIWGEKYFGKNFDRLVKVKTLVDPNNFFRNEQSIPPLPRHRH

SEQ ID NO: 802 - protein, 517 aa, Artificial Sequence
  Synthetic
NPQENFLHCFSKHIPNNVANPKLVYTQNDQLYMSILNSTIQNLRFTSDTTPKPLVIVTPSNVSHIQATILCSKKVGLQIRTRSGGHDAEGMSYISQVPFVVVDLRNMHSIKIDVHSQTAWVEAGATLGEVYYWINEKNENLSFPGGYCPTVGVGGHFSGGGYGALMRNYGLAADNIIDAHLVNVDGKVLDRKSMGEDLFWAIRGGGGENFGIIAAWKIKLVPVPSKVTIFSVKKNMEIHGLVKLFNKWQNIAYKYDKDLVLMTHFITKNITDNHGKNKTTVHGYFSSIFHGGVDSLVDLMNKSFPELGIKKTDCKEFSWIDTTIFYSGVVNFNTANFKKEILLDRSAGKKTAFSIKLDYVKKPIPETAMVKILEKLYEEDVGAGMYVLYPYGGIMEEISESAIPFPHRAGIMYELWYTASWEKQEDNEKHINWVRSVYNFTTPYVSKNPRLAYLNYRDLDLGKNNEESPNNYTQARIWGEKYFGKNFNRLVKVKTKVDPNNFFRNEQSIPPLPPHHH

SEQ ID NO: 803 - protein, 516 aa, Artificial Sequence
  Synthetic
NPRENFLKCFSQYIPNNATNLKLVYTQNNPLYMSVLNSTIHNLRFTSDTTPKPLVIVTPSHVSHIQATILCSKKVGLQIRTRSGGHDSEGMSYISQVPFVIVDLRNMRSIKIDVHSQTAWVEAGATLGEVYYWVNEKNENLSLAAGYCPTVCAGGHFGGGGYGPLMRNYGLAADNIIDAHLVNVHGKVLDRKSMGEDLFWALRGGGAESFGIIVAWKIRLVAVPKSTMFSVKKIMEIHELVKLVNKWQNIAYKYDKDLLLMTHFITRNITDNQGKNKTAIHTYFSSVFLGGVDSLVDLMNKSFPELGIKKEDCRELSWIDTIIFYSGVVNYDTDNFNKEILLDRSAGQNGAYKIKLDYVKKPIPESVFVQILEKLYEEDIGAGMYVLYPYGGIMDEISESAIPFPHRAGILYELWYICSWEKQEDNEKHLNWIRNIYNFMTPYVSKNPRLAYLNYRDLDIGINDPKNPNNYTQARIWGEKYFGKNFDRLVKVKTLVDPNNFFRNEQSIPPLPRHRH

SEQ ID NO: 804 - protein, 516 aa, Artificial Sequence
  Synthetic
NPRENFLKCFSQYIPNNATNLNLVYTQNNPLYMSVLNSTIHNLRFTSDTTPKPLVIVTPSHVSHIQATILCSKKVGLQIRTRSGGHDSEGMSYISQVPFVIVDLRNMRSIKIDVHSQTAWVEAGATLGEVYYWVNEKNENLSLAAGYCPTVCAGGHFGGGGYGPLMRNYGLAADNIIDAHLVNVNGKVLDRKSMGEDLFWALRGGGAESFGIIVAWKIRLVAVPKSTMFSVKKIMEIHELVKLVNKWQNIAYKYDKDLLLMTHFITRNITDNQGKNKTAIHTYFSSVFLGGVDSLVDLMNKSFPELGIKKEDCREMSWIDTIIFYSGVVNYDTDNFNKEILLDRSAGQNGAFKIKLDYVKKPIPESVFVQILEKLYEEDIGAGMYVLYPYGGIMDEISESAIPFPHRAGILYELWYICSWEKQEDNEKHLNWIRNIYNFMTPYVSKNPRLAYLNYRDLDIGINDPKNPNNYTQARIWGEKYFGKNFDRLVKVKTLVDPDNFFRNEQSIPPLPRHRH

SEQ ID NO: 805 - protein, 517 aa, Artificial Sequence
  Synthetic
NPRENFLKCFSKHIPNNVANPKLVYTQHDQLYSSILNSTIQNLRFISDTTPKPLVIVTPSNVSHIQATILCSKKVGLQIRTRSGGHDAEGMSYISQVPFVVVDLRNMHSIKIDVHSQTAWVEAGATLGEVYYWINEKNENLSFPGGYCPTVGVGGHFSGGGYGALMRKYGLAADNIIDAHLVNVDGKVLDRKSMGEDLFWAIRGGGGENFGIIAAWKIKLVDVPSKVTIFSVKKNMEIHGLVKLFNKWQNIAYKYDKDLVLMTHFITKNITDNHGKNKTTVHGYFSSIFHGGVDSLVDLMNKSFPELGIKKTDCKEFSWIDTTIFYSGVVNFNTANFKKEILLDRSAGKKTAFSIKLDYVKKPIPETAMVKILEKLYEEDVGAGMYVLYPYGGIMEEISESAIPFPHRAGIMYELWYTASWEKQEDNEKHINWVRSVYNFTTPYVSKNPRLAYLNYRDLDLGKNNHESPNNYTQARIWGEKYFGKNFNRLVKVKTKVDPNNFFRNEQSIPPLPPHHH

SEQ ID NO: 806 - protein, 516 aa, Artificial Sequence
  Synthetic
NPRENFLKCFSQYIPNNATNLKLVYTQNNPLYMSVLNSTIHNLRFTSDTTPKPLVIVTPSHVSHIQATILCSKKVGLQIRTRSGGHDSEGMSYISQVPFVIVDLRNMRSIKIDVHSQTAWVEAGATLGEVYYWVNEKNENLSLAAGYCPTVCAGGHFGGGGYGPLMRNYGLAADNIIDAHLVNVHGKVLDRKSMGEDLFWAIRGGGAESFGIIVAWKIRLVAVPKSTMFSVKKIMEIHELVKLVNKWQNIAYKYDKDLLLMTHFITRNITDNQGKNKTAIHTYFSSVFLGGVDSLVDLMNKSFPELGIKKEDCRELSWIDTIIFYSGVVNYDTDNFNKEILLDRSAGQNGAFKIKLDYVKKPIPESVFVQILEKLYEEDIGAGMYVLYPYGGIMDEISESAIPFPHRAGILYELWYICSWEKQEDNEKHLNWIRNIYNFMTPYVSKNPRLAYLNYRDLDIGINDPKNPNNYTQARIWGEKYFGKNFDRLVKVKTLVDPNNFFRNEQSIPPLPRHRH

SEQ ID NO: 807 - protein, 516 aa, Artificial Sequence
  Synthetic
NPRENFLKCFSQYIPNNATNLNLVYTQNNPLYMSVLNSTIHNLRFTSDTTPKPLVIVTPSHVSHIQATILCSKKVGLQIRTRSGGHDSEGMSYISQVPFVIVDLRNMRSIKIDVHSQTAWVQAGATLGEVYYWINEKNENLSLAAGYCPTVGAGGHFGGGGYGPLMRKYGLAADNIIDAHLVDVNGKVLDRKSMGEDLFWALRGGGAESFGIIVAWKIRLVAVPKSTMFSVKKIMEIHELVKLVNKWQNIAYKYDKDLLLMTHFITRNITDNQGKNKTAIHTYFSSVFLGGVDSLVDLMNKSFPELGIKKEDCREMSWIDTIIFYSGVVNYDTDNFNKEILLDRSAGQNGAFKIKLDYVKKPIPESVFVQILEKLYEEDIGAGMYVLYPYGGIMDEISESAIPFPHRAGILYELWYICSWEKQEDNEKHLNWIRNIYNFMTPYVSKNPRLAYLNYRDLDIGINDPKNPNNYTQARIWGEKYFGKNFDRLVKVKTLVDPNNFFRNEQSIPPLPRHRH

SEQ ID NO: 808 - protein, 516 aa, Artificial Sequence
  Synthetic
NPRENFLKCFSQYIPNNATNLNLVYTQNNPLYMSVLNSTIHNLRFTSDTTPKPLVIVTPSHVSHIQATILCSKKVGLQIRTRSGGHDSEGMSYISQVPFVIVDLRNMRSIKIDVHSQTAWVEAGATLGEVYYWVNEKNENLSLAAGYCPTVCAGGHFGGGGYGPLMRNYGLAADNIIDAHLVNVNGKVLDRKSMGEDLFWALRGGGAESFGIIVAWKIRLVAVPKSTMFSVKKIMEIHELVKLVNKWQNIAYKYDKDLLLMTHFITRNITDNQGKNKTAIHTYFSSVFLGGVDSLVDLMNKSFPELGIKKEDCREMSWIDTIIFYSGVVNYDTDNFNKEILLDRSAGQNGAFKIKLDYVKKPIPESVFVQILEKLYEEDIGAGMYVLYPYGGIMDEISESAIPFPHRAGILYELWYITSWEKQEDNEKHLNWIRNIYNFMTPYVSKNPRLAYLNYRDLDIGINDPKNPNNYTQARIWGEKYFGKNFDRLVKVKTLVDPNNFFRNEQSIPPLPRHRH

SEQ ID NO: 809 - protein, 516 aa, Artificial Sequence
  Synthetic
NPRENFLKCFSQYIPNNATNLNLVYTQNNPLYMSVLNSTIHNLRFTSDTTPKPLVIVTPSHVSHIQATILCSKKVGLQIRTRSGGHDSEGMSYISQVPFVIVDLRNMRSIKIDVHSQTAWVEAGATLGEVYYWVNEKNENLSLAAGYCPTVCAGGHFGGGGYGPLMRKYGLAADNIIDAHLVNVNGKVLDRKSMGEDLFWALRGGGAESFGIIVAWKIRLVAVPKSTMFSVKKIMEIHELVKLVNKWQNIAYKYDKDLLLMTHFITRNITDNQGKNKTAIHTYFSSVFLGGVDSLVDLMNKSFPELGIKKEDCREMSWIDTIIFYSGVVNYDTDNFNKEILLDRSAGQNGAFKIKLDYVKKPIPESVFVQILEKLYEEDIGAGMYVLYPYGGIMDEISESAIPFPHRAGILYELWYICSWEKQEDNEKHLNWIRNIYNFMTPYVSKNPRLAYLNYRDLDIGINDPKNPNNYTQARIWGEKYFGKNFDRLVKVKTLVDPNNFFRNEQSIPPLPRHRH

SEQ ID NO: 810 - protein, 516 aa, Artificial Sequence
  Synthetic
NPRENFLKCFSQYIPNNATNLKLVYTQNNPLYMSVLNSTIHNLRFTSDTTPKPLVIVTPSHVSHIQATILCSKKVGLQIRTRSGGHDAEGMSYISQVPFVIVDLRNMRSIKIDVHSQTAWVEAGATLGEVYYWVNEKNENLSLAAGYCPTVCAGGHFGGGGYGPLMRNYGLAADNIIDAHLVNVNGKVLDRKSMGEDLFWALRGGGAESFGIIVAWKIRLVAVPKSTMFSVKKIMEIHELVKLVNKWQNIAYKYDKDLLLMTHFITRNITDNQGKNKTAIHTYFSSVFLGGVDSLVDLMNKSFPELGIKKEDCREMSWIDTIIFYSGVVNYDTDNFNKEILLDRSAGQNGAFKIKLDYVKKPIPESVFVQILEKLYEEDIGAGMYVLYPYGGIMDEISESAIPFPHRAGILYELWYICSWEKQEDNEKHLNWIRNIYNFMTPYVSKNPRLAYLNYRDLDIGINDPKNPNNYTQARIWGEKYFGKNFDRLVKVKTLVDPNNFFRNEQSIPPLPRHRH

SEQ ID NO: 811 - protein, 517 aa, Artificial Sequence
  Synthetic
NPQENFLKCFSKHIPNNVANPKLVYTQNDQLYSSILNSTIQNLRFTSDTTPKPLVIVTPSNVSHIQATILCSKKVGLQIRTRSGGHDAEGMSYISQVPFVVVDLRNMHSIKIDVHSQTAWVEAGATLGEVYYWINEKNENLSFPGGYCPTVGVGGHFSGGGYGALMRNYGLAADNIIDAHLVNVDGKVLDRKSMGEDLFWAIRGGGGENFGIIAAWKIKLVPVPSKVTIFSVKKNMEIHGLVKLFNKWQNIAYKYDKDLLLMTHFITKNITDNHGKNKTTVHGYFSSIFHGGVDSLVDLMNKSFPELGIKKTDCKELSWIDTTIFYSGVVNFNTANFKKEILLDRSAGKKTAFSIKLDYVKKPIPETAMVKILEKLYEEDVGAGMYVLYPYGGIMDEISESAIPFPHRAGIMYELWYTASWEKQEDNEKHINWVRSVYNFTTPYVSKNPRLAYLNYRDLDLGKNNEESPNNYTQARIWGEKYFGKNFNRLVKVKTKVDPNNFFRNEQSIPPLPPHHH

SEQ ID NO: 812 - protein, 516 aa, Artificial Sequence
  Synthetic
NPRENFLKCFSQYIPNNATNLKLVYTQNNPLYMSVLNSTIHNLRFTSDTTPKPLVIVTPSHVSHIQGTILCSKKVGLQIRTRSGGHDAEGMSYISQVPFVIVDLRNMRSIKIDVHSQTAWVEAGATLGEVYYWVNEKNENLSLAAGYCPTVCAGGHFGGGGYGPLMRNYGLAADNIIDAHLVNVNGKVLDRKSMGEDLFWALRGGGAESFGIIVAWKIRLVAVPKSTMFSVKKIMEIHELVKLVNKWQNIAYKYDKDLLLMTHFITRNITDNQGKNKTAIHTYFSSVFLGGVDSLVDLMNKSFPELGIKKEDCRELSWIDTIIFYSGVVNYDTDNFNKEILLDRSAGQNGAFKIKLDYVKKPIPESVFVQILEKLYEEDIGAGMYALYPYGGIMDEISESAIPFPHRAGILYELWYICSWEKQEDNEKHLNWIRNIYNFMTPYVSKNPRLAYLNYRDLDIGINDPKNPNNYTQARIWGEKYFGKNFDRLVKVKTLVDPDNFFRNEQSIPPLPRHRH

SEQ ID NO: 813 - protein, 516 aa, Artificial Sequence
  Synthetic
NPRENFLKCFSQYIPNNATNLKLVYTQNNPLYMSVLNSTIHNLRFTSDTTPKPLVIVTPSHVSHIQATILCSKKVGLQIRTRSGGHDSEGMSYISQVPFVIVDLRNMRSIKIDVHSQTAWVEAGATLGEVYYWVNEKNENLSLAAGYCPTVCAGGHFGGGGYGPLMRNYGLAADNIIDAHLVNVHGKVLDRKSMGEDLFWALRGGGAESFGIIVAWKIRLVAVPKSTMFSVKKIMEIHELVKLVNKWQNIAYKYDKDLLLMTHFITRNITDNQGKNKTAIHTYFSSVFLGGVDSLVDLMNKSFPELGIKKEDCREMSWIDTIIFYSGVVNYDTDNFNKEILLDRSAGQNGAFKIKLDYVKKPIPESVFVQILEKLYEEDIGAGMYVLYPYGGIMDEISESAIPFPHRAGILYELWYICSWEKQEDNEKHLNWIRNIYNFMTPYVSKNPRLAYLNYRDLDIGINDPKNPNNYTQARIWGEKYFGKNFDRLVKVKTLVDPDNFFRNEQSIPPLPRHRH

SEQ ID NO: 814 - protein, 516 aa, Artificial Sequence
  Synthetic
NPRENFLKCFSQYIPNNATNLNLVYTQNNPLYMSVLNSTIQNLRFTSDTTPKPLVIVTPSHVSHIQATILCAKKVGLQIRTRSGGHDSEGMSYISQVPFVIVDLRNMRSIKIDVHSQTAWVEAGATLGEVYYWVNEKNENLSLAAGYCPTVCAGGHFGGGGYGPLMRNYGLAADNIIDAHLVNVNGKVLDRKSMGEDLFWALRGGGAESFGIIVAWKIRLVAVPKSTMFSVKKIMEIHELVKLVNKWQNIAYKYDKDLLLMTHFITRNITDNQGKNKTAIHTYFSSVFLGGVDSLVDLMNKSFPELGIKKEDCREMSWIDTIIFYSGVVNYDTDNFNKEILLDRSAGQNGAFKIKLDYVKKPIPESVFVQILEKLYEEDIGAGMYVLYPYGGIMDEISESAIPFPHRAGILYELWYICSWEKQEDNEKHLNWIRNIYNFMTPYVSKNPRLAYLNYRDLDIGINDPKNPNNYTQARIWGEKYFGKNFDRLVKVKTLVDPNNFFRNEQSIPPLPRHRH

SEQ ID NO: 815 - protein, 516 aa, Artificial Sequence
  Synthetic
NPRENFLKCFSQYIPNNATNLKLVYTQNNPLYMSVLNSTIHNLRFTSDTTPKPLVIVTPSHVSHIQATILCSKKVGLQIRTRSGGHDSEGMSYISQVPFVIVDLRNMRSIKIDVHSQTAWVEAGATLGEVYYWVNEKNENLSLAAGYCPTVCAGGHFGGGGYGPLMRNYGLAADNIIDAHLVDVHGKVLDRKSMGEDLFWALRGGGAESFGIIVAWKIRLVAVPKSTMFSVKKIMEIHELVKLVNKWQNIAYKYDKDLLLMTHFITRNITDNQGKNKTAIHTYFSSVFLGGVDSLVDLMNKSFPELGIKKEDCRELSWIDTIIFYSGVVNYDTDNFNKEILLDRSAGQNGAFKIKLDYVKKPIPESVFVQILEKLYEEDIGAGMYVLYPYGGIMDEISESAIPFPHRAGILYELWYICSWEKQEDNEKHLNWIRNIYNFMTPYVSKNPRLAYLNYRDLDIGINDPKNPNNYTQARIWGEKYFGKNFDRLVKVKTLVDPNNFFRNEQSIPPLPRHRH

SEQ ID NO: 816 - protein, 516 aa, Artificial Sequence
  Synthetic
NPRENFLKCFSQYIPNNATNLNLVYTQNNPLYMSVLNSTIHNLRFTSDTTPKPLVIVTPSHVSHIQGTILCSKKVGLQIRTRSGGHDSEGMSYISQVPFVIVDLRNMRSIKIDVHSQTAWVQAGATLGEVYYWINEKNENLSLAAGYCPTVGAGGHFGGGGYGPLMRKYGLAADNIIDAHLVDVNGKVLDRKSMGEDLFWALRGGGAESFGIIVAWKIRLVAVPKSTMFSVKKIMEIHELVKLVNKWQNIAYKYDKDLLLMTHFITRNITDNQGKNKTAIHTYFSSVFLGGVDSLVDLMNKSFPELGIKKEDCREMSWIDTIIFYSGVVNYDTDNFNKEILLDRSAGQNGAFKIKLDYVKKPIPESVFVQILEKLYEEDIGAGMYALYPYGGIMDEISESAIPFPHRAGILYELWYICSWEKQEDNEKHLNWIRNIYNFMTPYVSKNPRLAYLNYRDLDIGINDPKNPNNYTQARIWGEKYFGKNFDRLVKVKTLVDPNNFFRNEQSIPPLPRHRH

SEQ ID NO: 817 - protein, 516 aa, Artificial Sequence
  Synthetic
NPRENFLKCFSQYIPNNATNLKLVYTQNNPLYMSVLNSTIHNLRFTSDTTPKPLVIVTPSHVSHIQGTILCSKKVGLQIRTRSGGHDAEGMSYISQVPFVIVDLRNMRSIKIDVHSQTAWVEAGATLGEVYYWVNEKNENLSLAAGYCPTVCAGGHFGGGGYGPLMRNYGLAADNIIDAHLVNVHGKVLDRKSMGEDLFWALRGGGAESFGIIVAWKIRLVAVPKSTMFSVKKIMEIHELVKLVNKWQNIAYKYDKDLLLMTHFITRNITDNQGKNKTAIHTYFSSVFLGGVDSLVDLMNKSFPELGIKKEDCRELSWIDTIIFYSGVVNYDTDNFNKEILLDRSAGQNGAFKIKLDYVKKPIPESVFVQILEKLYEEDIGAGMYALYPYGGIMDEISESAIPFPHRAGILYELWYICSWEKQEDNEKHLNWIRNIYNFMTPYVSKNPRLAYLNYRDLDIGINDPKNPNNYTQARIWGEKYFGKNFDRLVKVKTLVDPDNFFRNEQSIPPLPRHRH

SEQ ID NO: 818 - protein, 516 aa, Artificial Sequence
  Synthetic
NPRENFLKCFSQYIPNNATNLKLVYTQNNPLYMSVLNSTIHNLRFTSDTTPKPLVIVTPSHVSHIQGTILCSKKVGLQIRTRSGGHDAEGMSYISQVPFVIVDLRNMRSIKIDVHSQTAWVEAGATLGEVYYWVNEKNENLSLAAGYCPTVCAGGHFGGGGYGPLMRNYGLAADNIIDAHLVNVHGKVLDRKSMGEDLFWALRGGGAESFGIIVAWKIRLVAVPKSTMFSVKKIMEIHELVKLVNKWQNIAYKYDKDLLLMTHFITRNITDNQGKNKTAIHTYFSSVFLGGVDSLVDLMNKSFPELGIKKEDCREMSWIDTIIFYSGVVNYDTDNFNKEILLDRSAGQNGAFKIKLDYVKKPIPESVFVQILEKLYEEDIGAGMYALYPYGGIMDEISESAIPFPHRAGILYELWYICSWEKQEDNEKHLNWIRNIYNFMTPYVSKNPRLAYLNYRDLDIGINDPKNPNNYTQARIWGEKYFGKNFDRLVKVKTLVDPDNFFRNEQSIPPLPRHRH

SEQ ID NO: 819 - protein, 516 aa, Artificial Sequence
  Synthetic
NPRENFLKCFSQYIPNNATNLNLVYTQNNPLYMSVLNSTIHNLRFTSDTTPKPLVIVTPSHVSHIQATILCSKKVGLQIRTRSGGHDSEGMSYISQVPFVIVDLRNMRSIKIDVHSQTAWVEAGATLGEVYYWINEKNENLSLAAGYCPTVGAGGHFGGGGYGPLMRKYGLAADNIIDAHLVDVNGKVLDRKSMGEDLFWALRGGGAESFGIIVAWKIRLVAVPKSTMFSVKKIMEIHELVKLVNKWQNIAYKYDKDLLLMTHFITRNITDNQGKNKTAIHTYFSSVFLGGVDSLVDLMNKSFPELGIKKEDCREMSWIDTIIFYSGVVNYDTDNFNKEILLDRSAGQNGAFKIKLDYVKKPIPESVFVQILEKLYEEDIGAGMYVLYPYGGIMDEISESAIPFPHRAGILYELWYICSWEKQEDNEKHLNWIRNIYNFMTPYVSKNPRLAYLNYRDLDIGINDPKNPNNYTQARIWGEKYFGKNFDRLVKVKTLVDPNNFFRNEQSIPPLPRHRH

SEQ ID NO: 820 - protein, 516 aa, Artificial Sequence
  Synthetic
NPRENFLKCFSQYIPNNATNLNLVYTQNNPLYMSVLNSTIHNLRFTSDTTPKPLVIVTPSHVSHIQATILCAKKVGLQIRTRSGGHDSEGMSYISQVPFVIVDLRNMRSIKIDVHSQTAWVEAGATLGEVYYWVNEKNENLSLAAGYCPTVCAGGHFGGGGYGPLMRNYGLAADNIIDAHLVNVNGKVLDRKSMGEDLFWALRGGGAESFGIIVAWKIRLVAVPKSTMFSVKKIMEIHELVKLVNKWQNIAYKYDKDLLLMTHFITRNITDNQGKNKTAIHTYFSSVFLGGVDSLVDLMNKSFPELGIKKEDCREMSWIDTIIFYSGVVNYDTDNFNKEILLDRSAGQNGAFKIKLDYVKKPIPESVFVQILEKLYEEDIGAGMYVLYPYGGIMDEISESAIPFPHRAGILYELWYICSWEKQEDNEKHLNWIRNIYNFMTPYVSKNPRLAYLNYRDLDIGINDPKNPNNYTQARIWGEKYFGKNFDRLVKVKTLVDPDNFFRNEQSIPPLPRHRH

SEQ ID NO: 821 - protein, 516 aa, Artificial Sequence
  Synthetic
NPRENFLKCFSQYIPNNATNLNLVYTQNNPLYMSVLNSTIQNLRFTSDTTPKPLVIVTPSHVSHIQATILCAKKVGLQIRTRSGGHDSEGMSYISQVPFVIVDLRNMRSIKIDVHSQTAWVEAGATLGEVYYWVNEKNENLSLAAGYCPTVCAGGHFGGGGYGPLMRNYGLAADNIIDAHLVNVNGKVLDRKSMGEDLFWALRGGGAESFGIIVAWKIRLVAVPKSTMFSVKKIMEIHELVKLVNKWQNIAYKYDKDLLLMTHFITRNITDNQGKNKTAIHTYFSSVFLGGVDSLVDLMNKSFPELGIKKEDCREMSWIDTIIFYSGVVNYDTDNFNKEILLDRSAGQNGAFKIKLDYVKKPIPESVFVQILEKLYEEDIGAGMYVLYPYGGIMDEISESAIPFPHRAGILYELWYICSWEKQEDNEKHLNWIRNIYNFMTPYVSKNPRLAYLNYRDLDIGINDPKNPNNYTQARIWGEKYFGKNFDRLVKVKTLVDPDNFFRNEQSIPPLPRHRH

SEQ ID NO: 822 - protein, 517 aa, Artificial Sequence
  Synthetic
NPQENFLQCFSKHIPNNVANPKLVYTQNDQLYMSILNSTIQNLRFTSDTTPKPLVIVTPSNVSHIQATILCSKKVGLQIRTRSGGHDAEGMSYISQVPFVVVDLRNMHSIKIDVHSQTAWVEAGATLGEVYYWINEKNENLSFPGGYCPTVGVGGHFSGGGYGALMRNYGLAADNIIDAHLVNVDGKVLDRKSMGEDLFWAIRGGGGENFGIIAAWKIKLVPVPSKVTIFSVKKNMEIHGLVKLFNKWQNIAYKYDKDLVLMTHFITKNITDNHGKNKTTVHGYFSSIFHGGVDSLVDLMNKSFPELGIKKTDCKEFSWIDTTIFYSGVVNFNTANFKKEILLDRSAGKKTAFSIKLDYVKKPIPETAMVKILEKLYEEDVGAGMYVLYPYGGIMEEISESAIPFPHRAGIMYELWYTASWEKQEDNEKHINWVRSVYNFTTPYVSKNPRLAYLNYRDLDLGKNNEESPNNYTQARIWGEKYFGKNFNRLVKVKTKVDPNNFFRNEQSIPPLPPHHH

SEQ ID NO: 823 - protein, 516 aa, Artificial Sequence
  Synthetic
NPRENFLKCFSQYIPNNATNLNLVYTQNNPLYMSVLNSTIHNLRFTSDTTPKPLVIVTPSHVSHIQGTILCSKKVGLQIRTRSGGHDSEGMSYISQVPFVIVDLRNMRSIKIDVHSQTAWVEAGATLGEVYYWINEKNENLSLAAGYCPTVGAGGHFGGGGYGPLMRKYGLAADNIIDAHLVDVNGKVLDRKSMGEDLFWALRGGGAESFGIIVAWKIRLVAVPKSTMFSVKKIMEIHELVKLVNKWQNIAYKYDKDLLLMTHFITRNITDNQGKNKTAIHTYFSSVFLGGVDSLVDLMNKSFPELGIKKEDCREMSWIDTIIFYSGVVNYDTDNFNKEILLDRSAGQNGAFKIKLDYVKKPIPESVFVQILEKLYEEDIGAGMYALYPYGGIMDEISESAIPFPHRAGILYELWYICSWEKQEDNEKHLNWIRNIYNFMTPYVSKNPRLAYLNYRDLDIGINDPKNPNNYTQARIWGEKYFGKNFDRLVKVKTLVDPNNFFRNEQSIPPLPRHRH

SEQ ID NO: 824 - protein, 517 aa, Artificial Sequence
  Synthetic
NPQENFLKCFSKHIPNNVANPKLVYTQNDQFYMSILNSTIQNLRFTSDTTPKPLVIVTPSNVSHIQATILCSKKVGLQIRTRSGGHDAEGMSYISQVPFVVVDLRNMHSIKIDVHSQTAWVEAGATLGEVYYWINEKNENLSFPGGYCPTVGVGGHFSGGGYGALMRNYGLAADNIIDAHLVNVDGKVLDRKSMGEDLFWAIRGGGGENFGIIAAWKIKLVPVPSKVTIFSVKKNMEIHGLVKLFNKWQNIAYKYDKDLVLMTHFITKNITDNHGKNKTTVHGYFSSIFHGGVDSLVDLMNKSFPELGIKKTDCKEFSWIDTTIFYSGVVNFNTANFKKEILLDRSAGKKTAFSIKLDYVKKPIPETAMVKILEKLYEEDVGAGMYVLYPYGGIMEEISESAIPFPHRAGIMYELWYTASWEKQEDNEKHINWVRSVYNFTTPYVSKNPRLAYLNYRDLDLGKNNEESPNNYTQARIWGEKYFGKNFNRLVKVKTKVDPNNFFRNEQSIPPLPPHHH

SEQ ID NO: 825 - protein, 516 aa, Artificial Sequence
  Synthetic
NPRENFLKCFSQYIPNNATNLNLVYTQNNPLYMSVLNSTIHNLRFTSDTTPKPLVIVTPSHVSHIQGTILCSKKVGLQIRTRSGGHDSEGMSYISQVPFVIVDLRNMRSIKIDVHSQTAWVQAGATLGEVYYWINEKNENLSLPAGYCPTVGAGGHFGGGGYGPLMRKYGLAADNIIDAHLVDVNGKVLDRKSMGEDLFWALRGGGAESFGIIVAWKIRLVAVPKSTMFSVKKIMEIHELVKLVNKWQNIAYKYDKDLLLMTHFITRNITDNQGKNKTAIHTYFSSVFLGGVDSLVDLMNKSFPELGIKKEDCREMSWIDTIIFYSGVVNYDTDNFNKEILLDRSAGQNGAFKIKLDYVKKPIPESVFVQILEKLYEEDIGAGMYALYPYGGIMDEISESAIPFPHRAGILYELWYICSWEKQEDNEKHLNWIRNIYNFMTPYVSKNPRLAYLNYRDLDIGINDPKNPNNYTQARIWGEKYFGKNFDRLVKVKTLVDPNNFFRNEQSIPPLPRHRH

SEQ ID NO: 826 - protein, 517 aa, Artificial Sequence
  Synthetic
NPQENFLKCFSKHIPNNVANPKLVYTQNDQLYMSILNSTIQNLRFTSDTTPKPLVIVTPSNVSHIQATILCSKKVGLQIRTRSGGHDAEGMSYISQVPFVVVDLRNMHSIKIDVHSQTAWVEAGATLGEVYYWINEKNENLSFPGGYCPTVGVGGHFSGGGYGALMRNYGLAADNIIDAHLVNVDGKVLDRKSMGEDLFWAIRGGGGENFGIIAAWKIKLVPVPSKVTIFSVKKNMEIHGLVKLFNKWQNIAYKYDKDLLLMTHFITKNITDNHGKNKTTVHGYFSSIFHGGVDSLVDLMNKSFPELGIKKTDCKELSWIDTTIFYSGVVNFNTANFKKEILLDRSAGKKTAFSIKLDYVKKPIPETAMVKILEKLYEEDVGAGMYVLYPYGGIMEEISESAIPFPHRAGIMYELWYTASWEKQEDNEKHINWVRSVYNFTTPYVSKNPRLAYLNYRDLDLGKNNEESPNNYTQARIWGEKYFGKNFNRLVKVKTKVDPNNFFRNEQSIPPLPPHHH

SEQ ID NO: 827 - protein, 516 aa, Artificial Sequence
  Synthetic
NPRENFLKCFSQYIPNNATNLNLVYTQNNPLYMSVLNSTIHNLRFTSDTTPKPLVIVTPSHVSHIQGTILCAKKVGLQIRTRSGGHDAEGMSYISQVPFVIVDLRNMRSIKIDVHSQTAWVEAGATLGEVYYWVNEKNENLSLAAGYCPTVCAGGHFGGGGYGPLMRNYGLAADNIIDAHLVNVNGKVLDRKSMGEDLFWALRGGGAESFGIIVAWKIRLVAVPKSTMFSVKKIMEIHELVKLVNKWQNIAYKYDKDLLLMTHFITRNITDNQGKNKTAIHTYFSSVFLGGVDSLVDLMNKSFPELGIKKEDCREMSWIDTIIFYSGVVNYDTDNFNKEILLDRSAGQNGAFKIKLDYVKKPIPESVFVQILEKLYEEDIGAGMYALYPYGGIMDEISESAIPFPHRAGILYELWYICSWEKQEDNEKHLNWIRNIYNFMTPYVSKNPRLAYLNYRDLDIGINDPKNPNNYTQARIWGEKYFGKNFDRLVKVKTLVDPDNFFRNEQSIPPLPRHRH

SEQ ID NO: 828 - protein, 516 aa, Artificial Sequence
  Synthetic
NPRENFLKCFSQYIPNNATNLKLVYTQNNPLYMSVLNSTIHNLRFTSDTTPKPLVIVTPSHVSHIQATILCSKKVGLQIRTRSGGHDSEGMSYISQVPFVIVDLRNMRSIKIDVHSQTAWVEAGATLGEVYYWVNEKNENLSLAAGYCPTVCAGGHFGGGGYGPLMRNYGLAADNIIDAHLVNVNGKVLDRKSMGEDLFWALRGGGAESFGIIVAWKIRLVAVPKSTMFSVKKIMEIHELVKLVNKWQNIAYKYDKDLLLMTHFITRNITDNQGKNKTAIHTYFSSVFLGGVDSLVDLMNKSFPELGIKKEDCRELSWIDTIIFYSGVVNYDTDNFNKEILLDRSAGQNGAFKIKLDYVKKPIPESVFVQILEKLYEEDIGAGMYVLYPYGGIMDEISESAIPFPHRAGILYELWYICSWEKQEDNEKHLNWIRNIYNFMTPYVSKNPRLAYLNYRDLDIGINDPKNPNNYTQARIWGEKYFGKNFDRLVKVKTLVDPDNFFRNEQSIPPLPRHRH

SEQ ID NO: 829 - protein, 516 aa, Artificial Sequence
  Synthetic
NPRENFLKCFSQYIPNNATNLNLVYTQNNPLYMSVLNSTIHNLRFTSDTTPKPLVIVTPSHVSHIQATILCAKKVGLQIRTRSGGHDSEGMSYISQVPFVIVDLRNMRSIKIDVHSQTAWVQAGATLGEVYYWINEKNENLSLAAGYCPTVGAGGHFGGGGYGPLMRKYGLAADNIIDAHLVDVNGKVLDRKSMGEDLFWALRGGGAESFGIIVAWKIRLVAVPKSTMFSVKKIMEIHELVKLVNKWQNIAYKYDKDLLLMTHFITRNITDNQGKNKTAIHTYFSSVFLGGVDELVDLMNKSFPELGIKKEDCREMSWIDTIIFYSGVVNYDTDNFNKEILLDRSAGQNGAFKIKLDYVKKPIPESVFVQILEKLYEEDIGAGMYVLYPYGGIMDEISESAIPFPHRAGILYELWYICSWEKQTDNEKHLNWIRNIYNFMTPYVSKNPRLAYLNYRDLDIGINDPKNPNNYTQARQWGEKYFGKNFDRLVKVKTLVDPNNFFRNEQSIPPLPRHRH

SEQ ID NO: 830 - protein, 516 aa, Artificial Sequence
  Synthetic
NPRENFLKCFSQYIPNNATNLNLVYTQNNPLYMSVLNSTIHNLRFTSDTTPKPLVIVTPSHVSHIQATILCSKKVGLQIRTRSGGHDSEGMSYISQVPFVIVDLRNMRSIKIDVHSQTAWVQAGATLGEVYYWVNEKNENLSLAAGYCPTVCAGGHFGGGGYGPLMRNYGLAADNIIDAHLVNVNGKVLDRKSMGEDLFWALRGGGAESFGIIVAWKIRLVAVPKSTMFSVKKIMEIHELVKLVNKWQNIAYKYDKDLLLMTHFITRNITDNQGKNKTAIHTYFSSVFLGGVDSLVDLMNKSFPELGIKKEDCREMSWIDTIIFYSGVVNYDTDNFNKEILLDRSAGQNGAFKIKLDYVKKPIPESVFVQILEKLYEEDIGAGMYVLYPYGGIMDEISESAIPFPHRAGILYELWYICSWEKQEDNEKHLNWIRNIYNFMTPYVSKNPRLAYLNYRDLDIGINDPKNPNNYTQARIWGEKYFGKNFDRLVKVKTLVDPNNFFRNEQSIPPLPRHRH

SEQ ID NO: 831 - protein, 516 aa, Artificial Sequence; identical to SEQ ID NO: 517
  Synthetic

SEQ ID NO: 832 - protein, 516 aa, Artificial Sequence
  Synthetic
NPRENFLKCFSQYIPNNATNLNLVYTQNNPLYMSVLNSTIHNLRFTSDTTPKPLVIVTPSHVSHIQATILCAKKHGLQIRTRSGGHDSEGMSYISQVPFVIVDLRNMRSIKIDVHSQTAWVQAGATLGEVYYWINEKNENLSLAAGYCPTVGAGGHFGGGGYGPLMRKYGLAADNIIDAHLVDVNGKVLDRKSMGEDLFWALRGGGAESFGIIVAWKIRLVAVPKSTMFSVKKIMEIHELVKLVNKWQNIAYKYDKDLLLMTHFITRNITDNQGKNKTAIHTYFSSVFLGGVDELVDLMNKSFPELGIKKEDCREMSWIDTIIFYSGVVNYDTDNFNKEILLDRSAGQNGAFKIKLDYVKKPIPESVFVQILEKLYEEDIGAGMYVLYPYGGIMDEISESAIPFPHRAGILYELWYICSWEKQTDNEKHLNWIRNIYNFMTPYVSKNPRLAYLNYRDLDIGINDPKNPNNYTQARQWGEKYFGKNFDRLVKVKTLVDPNNFFRNEQSIPPLPRHRH

SEQ ID NO: 833 - protein, 516 aa, Artificial Sequence
  Synthetic
NPRENFLKCFSQYIPNNATNLNLVYTQNNPLYMSVLNSTIHNLRFTSDTTPKPLVIVTPSHVSHIQATILCSKKVGLQIRTRSGGHDSEGMSYISQVPFVIVDLRNMRSIKIDVHSQTAWVEAGATLGEVYYWVNEKNENLSLAAGYCPTVCAGGHFGGGGYGPLMRNYGLAADNIIDAHLVDVNGKVLDRKSMGEDLFWALRGGGAESFGIIVAWKIRLVAVPKSTMFSVKKIMEIHELVKLVNKWQNIAYKYDKDLLLMTHFITRNITDNQGKNKTAIHTYFSSVFLGGVDSLVDLMNKSFPELGIKKEDCREMSWIDTIIFYSGVVNYDTDNFNKEILLDRSAGQNGAFKIKLDYVKKPIPESVFVQILEKLYEEDIGAGMYVLYPYGGIMDEISESAIPFPHRAGILYELWYICSWEKQEDNEKHLNWIRNIYNFMTPYVSKNPRLAYLNYRDLDIGINDPKNPNNYTQARIWGEKYFGKNFDRLVKVKTLVDPNNFFRNEQSIPPLPRHRH

SEQ ID NO: 834 - protein, 516 aa, Artificial Sequence
  Synthetic
NPRENFLKCFSQYIPNNATNLKLVYTQNNPLYMSVLNSTIHNLRFTSDTTPKPLVIVTPSHVSHIQATILCSKKVGLQIRTRSGGHDSEGMSYISQVPFVIVDLRNMRSIKIDVHSQTAWVEAGATLGEVYYWVNEKNENLSLAAGYCPTVCAGGHFGGGGYGPLMRNYGLAADNIIDAHLVNVHGKVLDRKSMGEDLFWALRGGGAESFGIIVAWKIRLVAVPKSTMFSVKKIMEIHELVKLVNKWQNIAYKYDKDLLLMTHFITRNITDNQGKNKTAIHTYFSSVFLGGVDSLVDLMNKSFPELGIKKEDCRELSWIDTIIFYSGVVNYDTDNFNKEILLDRSAGVNGAFKIKLDYVKKPIPESVFVQILEKLYEEDIGAGMYVLYPYGGIMDEISESAIPFPHRAGILYELWYICSWEKQEDNEKHLNWIRNIYNFMTPYVSKNPRLAYLNYRDLDIGINDPKNPNNYTQARIWGEKYFGKNFDRLVKVKTLVDPNNFFRNEQSIPPLPRHRH

SEQ ID NO: 835 - protein, 516 aa, Artificial Sequence
  Synthetic
NPRENFLKCFSQYIPNNATNLNLVYTQNNPLYMSVLNSTIQNLRFTSDTTPKPLVIVTPSHVSHIQATILCSKKVGLQIRTRSGGHDSEGMSYISQVPFVIVDLRNMRSIKIDVHSQTAWVEAGATLGEVYYWVNEKNENLSLAAGYCPTVCAGGHFGGGGYGPLMRNYGLAADNIIDAHLVNVNGKVLDRKSMGEDLFWALRGGGAESFGIIVAWKIRLVAVPKSTMFSVKKIMEIHELVKLVNKWQNIAYKYDKDLLLMTHFITRNITDNQGKNKTAIHTYFSSVFLGGVDSLVDLMNKSFPELGIKKEDCREMSWIDTIIFYSGVVNYDTDNFNKEILLDRSAGQNGAFKIKLDYVKKPIPESVFVQILEKLYEEDIGAGMYVLYPYGGIMDEISESAIPFPHRAGILYELWYICSWEKQEDNEKHLNWIRNIYNFMTPYVSKNPRLAYLNYRDLDIGINDPKNPNNYTQARIWGEKYFGKNFDRLVKVKTLVDPDNFFRNEQSIPPLPRHRH

SEQ ID NO: 836 - protein, 516 aa, Artificial Sequence
  Synthetic
NPRENFLKCFSQYIPNNATNLKLVYTQNNPLYMSVLNSTIHNLRFTSDTTPKPLVIVTPSHVSHIQGTILCSKKVGLQIRTRSGGHDSEGMSYISQVPFVIVDLRNMRSIKIDVHSQTAWVEAGATLGEVYYWINEKNENLSLAAGYCPTVGAGGHFGGGGYGPLMRKYGLAADNIIDAHLVDVHGKVLDRKSMGEDLFWALRGGGAESFGIIVAWKIRLVAVPKSTMFSVKKIMEIHELVKLVHKWQNIAYKYDKDLLLMTHFITRNITDNQGKNKTAIHTYFSSVFLGGVDSLVDLMNKSFPELGIKKEDCRELSWIDTIIFYSGVVNYDTDNFNKEILLDRSAGQNGAFKIKLDYVKKPIPESVFVQILEKLYEEDIGAGMYALYPYGGIMDEISESAIPFPHRAGILYELWYICSWEKQEDNEKHLNWIRNIYNFMTPYVSKNPRLAYLNYRDLDIGINDPKNPNNYTQARIWGEKYFGKNFDRLVKVKTLVDPNNFFRNEQSIPPLPRHRH

SEQ ID NO: 837 - protein, 517 aa, Artificial Sequence
  Synthetic
NPRENFLKCFSKHIPNNVANPKLVYTQNDSLYSSILNSTIQNLRFISDTTPKPLVIVTPSNVSHIQATILCSKKVGLQIRTRSGGHDAEGMSYISQVPFVVVDLRNMHSIKIDVHSQTAWVEAGATLGEVYYWINEKNENLSFPGGYCPTVGVGGHFSGGGYGALMRNYGLAADNIIDAHLVNVDGKVLDRKSMGEDLFWAIRGGGGENFGIIAAWKIKLVDVPSKVTIFSVKKNMEIHGLVKLFNKWQNIAYKYDKDLVLMTHFITKNITDNHGKNKTTVHGYFSSIFHGGVDSLVDLMNKSFPELGIKKTDCKEFSWIDTTIFYSGVVNFNTANFKKEILLDRSAGKKTAFSIKLDYVKKPIPETAMVKILEKLYEEDVGAGMYVLYPYGGIMEEISESAIPFPHRAGIMYELWYTASWEKQEDNEKHINWVRSVYNFTTPYVSKNPRLAYLNYRDLDLGKNNEESPNNYTQARIWGEKYFGKNFNRLVKVKTKVDPNNFFRNEQSIPPLPPHHH

SEQ ID NO: 838 - protein, 516 aa, Artificial Sequence
  Synthetic
NPRENFLKCFSQYIPNNATNLKLVYTQNNPLYMSVLNSTIHNLRFTSDTTPKPLVIVTPSHVSHIQATILCSKKVGLQIRTRSGGHDSEGMSYISQVPFVIVDLRNMRSIKIDVHSQTAWVQAGATLGEVYYWVNEKNENLSLAAGYCPTVCAGGHFGGGGYGPLMRNYGLAADNIIDAHLVNVHGKVLDRKSMGEDLFWALRGGGAESFGIIVAWKIRLVAVPKSTMFSVKKIMEIHELVKLVNKWQNIAYKYDKDLLLMTHFITRNITDNQGKNKTAIHTYFSSVFLGGVDSLVDLMNKSFPELGIKKEDCRELSWIDTIIFYSGVVNYDTDNFNKEILLDRSAGQNGAFKIKLDYVKKPIPESVFVQILEKLYEEDIGAGMYVLYPYGGIMDEISESAIPFPHRAGILYELWYICSWEKQEDNEKHLNWIRNIYNFMTPYVSKNPRLAYLNYRDLDIGINDPKNPNNYTQARIWGEKYFGKNFDRLVKVKTLVDPNNFFRNEQSIPPLPRHRH

SEQ ID NO: 839 - protein, 516 aa, Artificial Sequence
  Synthetic
NPRENFLKCFSQYIPNNATNLNLVYTQNNPLYMSVLNSTIHNLRFTSDTTPKPLVIVTPSHVSHIQATILCSKKVGLQIRTRSGGHDAEGMSYISQVPFVIVDLRNMRSIKIDVHSQTAWVEAGATLGEVYYWVNEKNENLSLAAGYCPTVCAGGHFGGGGYGPLMRNYGLAADNIIDAHLVNVNGKVLDRKSMGEDLFWALRGGGAESFGIIVAWKIRLVAVPKSTMFSVKKIMEIHELVKLVNKWQNIAYKYDKDLLLMTHFITRNITDNQGKNKTAIHTYFSSVFLGGVDSLVDLMNKSFPELGIKKEDCRELSWIDTIIFYSGVVNYDTDNFNKEILLDRSAGQNGAFKIKLDYVKKPIPESVFVQILEKLYEEDIGAGMYVLYPYGGIMDEISESAIPFPHRAGILYELWYICSWEKQEDNEKHLNWIRNIYNFMTPYVSKNPRLAYLNYRDLDIGINDPKNPNNYTQARIWGEKYFGKNFDRLVKVKTLVDPNNFFRNEQSIPPLPRHRH

SEQ ID NO: 840 - protein, 516 aa, Artificial Sequence
  Synthetic
NPRENFLKCFSQYIPNNATNLNLVYTQNNPLYMSVLNSTIQNLRFTSDTTPKPLVIVTPSHVSHIQATILCAKKVGLQIRTRSGGHDAEGMSYISQVPFVIVDLRNMRSIKIDVHSQTAWVEAGATLGEVYYWVNEKNENLSLAAGYCPTVCAGGHFGGGGYGPLMRNYGLAADNIIDAHLVNVNGKVLDRKSMGEDLFWALRGGGAESFGIIVAWKIRLVAVPKSTMFSVKKIMEIHELVKLVNKWQNIAYKYDKDLLLMTHFITRNITDNQGKNKTAIHTYFSSVFLGGVDSLVDLMNKSFPELGIKKEDCREMSWIDTIIFYSGVVNYDTDNFNKEILLDRSAGQNGAFKIKLDYVKKPIPESVFVQILEKLYEEDIGAGMYVLYPYGGIMDEISESAIPFPHRAGILYELWYICSWEKQEDNEKHLNWIRNIYNFMTPYVSKNPRLAYLNYRDLDIGINDPKNPNNYTQARIWGEKYFGKNFDRLVKVKTLVDPDNFFRNEQSIPPLPRHRH

SEQ ID NO: 841 - protein, 516 aa, Artificial Sequence
  Synthetic
NPRENFLKCFSQYIPNNATNLKLVYTQNNPLYMSVLNSTIHNLRFTSDTTPKPLVIVTPSHVSHIQATILCSKKVGLQIRTRSGGHDSEGMSYISQVPFVIVDLRNMRSIKIDVHSQTAWVEAGATLGEVYYWVNEKNENLSLAAGYCPTVCAGGHFGGGGYGPLMRNYGLAADNIIDAHLVNVHGKVLDRKSMGEDLFWALRGGGAESFGIIVAWKIRLVAVPKSTMFSVKKIMEIHELVKLVNKWQNIAYKYDKDLLLMTHFITRNITDNQGKNKTAIHTYFSSVFLGGVDSLVDLMNKSFPELGIKKEDCRELSWIDTIIFYSGVVNYDTDNFNKEILLDRSAGRNGAFKIKLDYVKKPIPESVFVQILEKLYEEDIGAGMYVLYPYGGIMDEISESAIPFPHRAGILYELWYICSWEKQEDNEKHLNWIRNIYNFMTPYVSKNPRLAYLNYRDLDIGINDPKNPNNYTQARIWGEKYFGKNFDRLVKVKTLVDPNNFFRNEQSIPPLPRHRH

SEQ ID NO: 842 - protein, 516 aa, Artificial Sequence
  Synthetic
NPRENFLKCFSQYIPNNATNLNLVYTQNNPLYMSVLNSTIHNLRFTSDTTPKPLVIVTPSHVSHIQATILCSKKVGLQIRTRSGGHDSEGMSYISQVPFVIVDLRNMRSIKIDVHSQTAWVEAGATLGEVYYWVNEKNENLSLAAGYCPTVCAGGHFGGGGYGPLMRNYGLAADNIIDAHLVNVNGKVLDRKSMGEDLFWALRGGGAESFGIIVAWKIRLVAVPKSTMFSVKKIMEIHELVKLVNKWQNIAYKYDKDLLLMTHFITRNITDNQGKNKTAIHTYFSSVFLGGVDSLVDLMNKSFPELGIKKEDCREMSWIDTIIFYSGVVNYDTDNFNKEILLDRSAGQNGAFKIKLDYVKKPIPESVFVQILEKLYEEDIGAGMYVMYPYGGIMDEISESAIPFPHRAGILYELWYICSWEKQEDNEKHLNWIRNIYNFMTPYVSKNPRLAYLNYRDLDIGINDPKNPNNYTQARIWGEKYFGKNFDRLVKVKTLVDPNNFFRNEQSIPPLPRHRH

SEQ ID NO: 843 - protein, 516 aa, Artificial Sequence; identical to SEQ ID NO: 532
  Synthetic

SEQ ID NO: 844 - protein, 516 aa, Artificial Sequence
  Synthetic
NPRENFLKCFSQYIPNNATNLNLVYTQNNPLYMSVLNSTIHNLRFTSDTTPKPLVIVTPSHVSHIQATILCSKKHGLQIRTRSGGHDSEGMSYISQVPFVIVDLRNMRSIKIDVHSQTAWVEAGATLGEVYYWVNEKNENLSLAAGYCPTVCAGGHFGGGGYGPLMRNYGLAADNIIDAHLVNVNGKVLDRKSMGEDLFWALRGGGAESFGIIVAWKIRLVAVPKSTMFSVKKIMEIHELVKLVNKWQNIAYKYDKDLLLMTHFITRNITDNQGKNKTAIHTYFSSVFLGGVDSLVDLMNKSFPELGIKKEDCREMSWIDTIIFYSGVVNYDTDNFNKEILLDRSAGQNGAFKIKLDYVKKPIPESVFVQILEKLYEEDIGAGMYVLYPYGGIMDEISESAIPFPHRAGILYELWYICSWEKQEDNEKHLNWIRNIYNFMTPYVSKNPRLAYLNYRDLDIGINDPKNPNNYTQARIWGEKYFGKNFDRLVKVKTLVDPNNFFRNEQSIPPLPRHRH

SEQ ID NO: 845 - protein, 516 aa, Artificial Sequence; identical to SEQ ID NO: 550
  Synthetic

SEQ ID NO: 846 - protein, 516 aa, Artificial Sequence
  Synthetic
NPRENFLKCFSQYIPNNATNLNLVYTQNNPLYMSVLNSTIHNLRFTSDTTPKPLVIVTPSHVSHIQATILCSKKVGLQIRTRSGGHDSEGMSYISQVPFVIVDLRNMRSIKIDVHSQTAWVEAGATLGEVYYWVNEKNENLSLAAGFCPTVCAGGHFGGGGYGPLMRNYGLAADNIIDAHLVNVNGKVLDRKSMGEDLFWALRGGGAESFGIIVAWKIRLVAVPKSTMFSVKKIMEIHELVKLVNKWQNIAYKYDKDLLLMTHFITRNITDNQGKNKTAIHTYFSSVFLGGVDSLVDLMNKSFPELGIKKEDCREMSWIDTIIFYSGVVNYDTDNFNKEILLDRSAGQNGAFKIKLDYVKKPIPESVFVQILEKLYEEDIGAGMYVLYPYGGIMDEISESAIPFPHRAGILYELWYICSWEKQEDNEKHLNWIRNIYNFMTPYVSKNPRLAYLNYRDLDIGINDPKNPNNYTQARIWGEKYFGKNFDRLVKVKTLVDPNNFFRNEQSIPPLPRHRH

SEQ ID NO: 847 - protein, 516 aa, Artificial Sequence
  Synthetic
NPRENFLKCFSQYIPNNATNLKLVYTQNNPLYMSVLNSTIHNLRFTSDTTPKPLVIVTPSHVSHIQGTILCSKKVGLQIRTRSGGHDSEGMSYISQVPFVIVDLRNMRSIKIDVHSQTAWVEAGATLGEVYYWVNEKNENLSLAAGYCPTVCAGGHFGGGGYGPLMRNYGLAADNIIDAHLVDVHGKVLDRKSMGEDLFWALRGGGAESFGIIVAWKIRLVAVPKSTMFSVKKIMEIHELVKLVNKWQNIAYKYDKDLLLMTHFITRNITDNQGKNKTAIHTYFSSVFLGGVDSLVDLMNKSFPELGIKKEDCRELSWIDTIIFYSGVVNYDTDNFNKEILLDRSAGQNGAFKIKLDYVKKPIPESVFVQILEKLYEEDIGAGMYALYPYGGIMDEISESAIPFPHRAGILYELWYICSWEKQEDNEKHLNWIRNIYNFMTPYVSKNPRLAYLNYRDLDIGINDPKNPNNYTQARIWGEKYFGKNFDRLVKVKTLVDPNNFFRNEQSIPPLPRHRH

SEQ ID NO: 848 - protein, 516 aa, Artificial Sequence
  Synthetic
NPRENFLKCFSQYIPNNATNLKLVYTQNNPLYMSVLNSTIHNLRFTSDTTPKPLVIVTPSHVSHIQATILCAKKVGLQIRTRSGGHDSEGMSYISQVPFVIVDLRNMRSIKIDVHSQTAWVEAGATLGEVYYWVNEKNENLSLAAGYCPTVCAGGHFGGGGYGPLMRNYGLAADNIIDAHLVNVHGKVLDRKSMGEDLFWALRGGGAESFGIIVAWKIRLVAVPKSTMFSVKKIMEIHELVKLVNKWQNIAYKYDKDLLLMTHFITRNITDNQGKNKTAIHTYFSSVFLGGVDSLVDLMNKSFPELGIKKEDCRELSWIDTIIFYSGVVNYDTDNFNKEILLDRSAGQNGAFKIKLDYVKKPIPESVFVQILEKLYEEDIGAGMYVLYPYGGIMDEISESAIPFPHRAGILYELWYICSWEKQEDNEKHLNWIRNIYNFMTPYVSKNPRLAYLNYRDLDIGINDPKNPNNYTQARIWGEKYFGKNFDRLVKVKTLVDPNNFFRNEQSIPPLPRHRH

SEQ ID NO: 849 - protein, 516 aa, Artificial Sequence
  Synthetic
NPRENFLKCFSQYIPNNATNLNLVYTQNNPLYMSVLNSTIHNLRFTSDTTPKPLVIVTPSHVSHIQGTILCSKKVGLQIRTRSGGHDSEGMSYISQVPFVIVDLRNMRSIKIDVHSQTAWVEAGATLGEVYYWVNEKNENLSLAAGYCPTVCAGGHFGGGGYGPLMRKYGLAADNIIDAHLVNVNGKVLDRKSMGEDLFWALRGGGAESFGIIVAWKIRLVAVPKSTMFSVKKIMEIHELVKLVNKWQNIAYKYDKDLLLMTHFITRNITDNQGKNKTAIHTYFSSVFLGGVDSLVDLMNKSFPELGIKKEDCREMSWIDTIIFYSGVVNYDTDNFNKEILLDRSAGQNGAFKIKLDYVKKPIPESVFVQILEKLYEEDIGAGMYALYPYGGIMDEISESAIPFPHRAGILYELWYICSWEKQEDNEKHLNWIRNIYNFMTPYVSKNPRLAYLNYRDLDIGINDPKNPNNYTQARIWGEKYFGKNFDRLVKVKTLVDPNNFFRNEQSIPPLPRHRH

SEQ ID NO: 850 - protein, 516 aa, Artificial Sequence; identical to SEQ ID NO: 804
  Synthetic

SEQ ID NO: 851 - protein, 516 aa, Artificial Sequence
  Synthetic
NPRENFLKCFSQYIPNNATNLKLVYTQNNPLYMSVLNSTIHNLRFTSDTTPKPLVIVTPSHVSHIQATILCSKKVGLQIRTRSGGHDSEGMSYISQVPFVIVDLRNMRSIKIDVHSQTAWVEAGATLGEVYYWVNEKNENLSLAAGYCPTVCAGGHFGGGGYGPLMRNYGLAADNIIDAHLVNVHGKVLDRKSMGEDLFWALRGGGAESFGIIVAWKIRLVAVPKSTMFSVKKIMEIHELVKLVNKWQNIAYKYDKDLLLMTHFITRNITDNQGKNKTAIHTYFSSVFLGGVDSLVDLMNKSFPELGIKKEDCRELSWIDTIIFYSGVVNYDTDNFNKEILLDRSAGQNGAFKIKLDYVKKPIPESVFVQILEKLYEEDIGAGMYVLYPYGGIMDEISESAIPFPHRAGILYELWYICSWEKQEDNEKHLNWIRNIYNFMTPYVSKNPRLAYLNYRDLDIGINDPKNPNNYTQARIWGEKYFGKNFDRLVKVKTLVDPNNFFRNEQSIPPLPRMRH

SEQ ID NO: 852 - protein, 516 aa, Artificial Sequence
  Synthetic
NPRENFLKCFSQYIPNNATNLNLVYTQNNPLYMSVLNSTIHNLRFTSDTTPKPLVIVTPSHVSHIQATILCSKKVGLQIRTRSGGHDSEGMSYISQVPFVIVDLRNMRSIKIDVHSQTAWVEAGATLGEVYYWVNEKNENLSLAAGYCPTVCAGGHFGGGGYGPLMRNYGLAADNIIDAHLVNVNGKVLDRKSMGEDLFWALRGGGAESFGIIVAWKIRLVAVPKSTMFSVKKIMEIHELVKLVNKWQNIAYKYDKDLLLMAHFITRNITDNQGKNKTAIHTYFSSVFLGGVDSLVDLMNKSFPELGIKKEDCREMSWIDTIIFYSGVVNYDTDNFNKEILLDRSAGQNGAFKIKLDYVKKPIPESVFVQILEKLYEEDIGAGMYVLYPYGGIMDEISESAIPFPHRAGILYELWYICSWEKQEDNEKHLNWIRNIYNFMTPYVSKNPRLAYLNYRDLDIGINDPKNPNNYTQARIWGEKYFGKNFDRLVKVKTLVDPNNFFRNEQSIPPLPRHRH

SEQ ID NO: 853 - protein, 516 aa, Artificial Sequence
  Synthetic
NPRENFLKCFSQYIPNNATNLNLVYTQNNPLYMSVLNSTIHNLRFTSDTTPKPLVIVTPSHVSHIQGTILCSKKVGLQIRTRSGGHDSEGMSYISQVPFVIVDLRNMRSIKIDVHSQTAWVEAGATLGEVYYWVNEKNENLSLAAGYCPTVCAGGHFGGGGYGPLMRNYGLAADNIIDAHLVNVNGKVLDRKSMGEDLFWAIRGGGAESFGIIVAWKIRLVAVPKSTMFSVKKIMEIHELVKLVNKWQNIAYKYDKDLLLMTHFITRNITDNQGKNKTAIHTYFSSVFLGGVDSLVDLMNKSFPELGIKKEDCREMSWIDTIIFYSGVVNYDTDNFNKEILLDRSAGQNGAFKIKLDYVKKPIPESVFVQILEKLYEEDIGAGMYALYPYGGIMDEISESAIPFPHRAGILYELWYICSWEKQEDNEKHLNWIRNIYNFMTPYVSKNPRLAYLNYRDLDIGINDPKNPNNYTQARIWGEKYFGKNFDRLVKVKTLVDPNNFFRNEQSIPPLPRHRH

SEQ ID NO: 854 - protein, 516 aa, Artificial Sequence
  Synthetic
NPRENFLKCFSQYIPNNATNLKLVYTQNNPLYMSVLNSTIHNLRFTSDTTPKPLVIVTPSHVSHIQATILCSKKVGLQIRTRSGGHDSEGMSYISQVPFVIVDLRNMRSIKIDVHSQTAWVEAGATLGEVYYWVNEKNENLSLPAGYCPTVCAGGHFGGGGYGPLMRNYGLAADNIIDAHLVNVHGKVLDRKSMGEDLFWALRGGGAESFGIIVAWKIRLVAVPKSTMFSVKKIMEIHELVKLVNKWQNIAYKYDKDLLLMTHFITRNITDNQGKNKTAIHTYFSSVFLGGVDSLVDLMNKSFPELGIKKEDCRELSWIDTIIFYSGVVNYDTDNFNKEILLDRSAGQNGAFKIKLDYVKKPIPESVFVQILEKLYEEDIGAGMYVLYPYGGIMDEISESAIPFPHRAGILYELWYICSWEKQEDNEKHLNWIRNIYNFMTPYVSKNPRLAYLNYRDLDIGINDPKNPNNYTQARIWGEKYFGKNFDRLVKVKTLVDPNNFFRNEQSIPPLPRHRH

SEQ ID NO: 855 - protein, 516 aa, Artificial Sequence
  Synthetic
NPRENFLKCFSQYIPNNATNLNLVYTQNNPLYMSVLNSTIHNLRFTSDTTPKPLVIVTPSHVSHIQATILCSKKVGLQIRTRSGGHDSEGMSYISQVPFVIVDLRNMRSIKIDVHSQTAWVEAGATLGEVYYWVNEKNENLSLAAGYCPTVCAGGHFGGGGYGPLMRNYGLAADNIIDAHLVNVNGKVLDRKSMGEDLFWALRGGGAESFGIIVAWKIRLVAVPKSTMFSVKKIMEIHELVKLVNKWQNIAYKYDKDLLLMTHFITRNITDNQGKNKTAIHTYFSSVFLGGVDSLVDLMNKSFPELGIKKEDCRELSWIDTIIFYSGVVNYDTDNFNKEILLDRSAGQNGAFKIKLDYVKKPIPESVFVQILEKLYEEDIGAGMYVLYPYGGIMDEISESAIPFPHRAGILYELWYICSWEKQEDNEKHLNWIRNIYNFMTPYVSKNPRLAYLNYRDLDIGINDPKNPNNYTQARIWGEKYFGKNFDRLVKVKTLVDPDNFFRNEQSIPPLPRHRH

SEQ ID NO: 856 - protein, 516 aa, Artificial Sequence
  Synthetic
NPRENFLKCFSQYIPNNATNLKLVYTQNNPLYMSVLNSTIHNLRFTSDTTPKPLVIVTPSHVSHIQATILCSKKVGLQIRTRSGGHDSEGMSYISQVPFVIVDLRNMRSIKIDVHSQTAWVEAGATLGEVYYWVNEKNENLSLAAGYCPTVCAGGHFGGGGYGPLMRNYGLAADNIIDAHLVNVHGKVLDRKSMGEDLFWALRGGGAESFGIIVAWKIRLVAVPKSTMFSVKKIMEIHELVKLVNKWQNIAYKYDKDLLLMTHFITRNITDNQGKNKTAIHTYFSSVFLGGVDSLVDLMNKSFPELGIKKEDCRELSWIDTIIFYSGVVNYDTDNFNKEILLDRSAGTNGAFKIKLDYVKKPIPESVFVQILEKLYEEDIGAGMYVLYPYGGIMDEISESAIPFPHRAGILYELWYICSWEKQEDNEKHLNWIRNIYNFMTPYVSKNPRLAYLNYRDLDIGINDPKNPNNYTQARIWGEKYFGKNFDRLVKVKTLVDPNNFFRNEQSIPPLPRHRH

SEQ ID NO: 857 - protein, 516 aa, Artificial Sequence
  Synthetic
NPRENFLKCFSQYIPNNATNLKLVYTQNNPLYMSVLNSTIHNLRFTSDTTPKPLVIVTPSHVSHIQATILCSKKVGLQIRTRSGGHDSEGMSYISQVPFVIVDLRNMRSIKIDVHSQTAWVEAGATLGEVYYWVNEKNENLSLAAGYCPTVCAGGHFGGGGYGPLMRNYGLAADNIIDAHLVNVHGKVLDRKSMGEDLFWALRGGGAESFGIIVAWKIRLVAVPKSTMFSVKKIMEIHELVKLVNKWQNIAYKYDKDLLLMTHFITRNITDNQGKNKTAIHTYFSSVFLGGVDSLVDLMNKSFPELGIKKEDCRELSWIDTIIFYSGVVNYDTDNFNKEILLDRSAGQNGAFKIKLDYVKKPIPESVFVQILEKLYEEDIGAGMYVLYPYGGIMDEISESAIPFPHRAGILYELWYICSWEKQEDNEKHLNWIRNIYNFMTPYVSKNPRLSYLNYRDLDIGINDPKNPNNYTQARIWGEKYFGKNFDRLVKVKTLVDPNNFFRNEQSIPPLPRHRH

SEQ ID NO: 858 - protein, 516 aa, Artificial Sequence
  Synthetic
NPRENFLKCFSQYIPNNATNLKLVYTQNNPLYMSVLNSTIHNLRFTSDTTPKPLVIVTPSHVSHIQGTILCSKKVGLQIRTRSGGHDAEGMSYISQVPFVIVDLRNMRSIKIDVHSQTAWVEAGATLGEVYYWVNEKNENLSLAAGYCPTVCAGGHFGGGGYGPLMRNYGLAADNIIDAHLVNVNGKVLDRKSMGEDLFWALRGGGAESFGIIVAWKIRLVAVPKSTMFSVKKIMEIHELVKLVNKWQNIAYKYDKDLLLMTHFITRNITDNQGKNKTAIHTYFSSVFLGGVDSLVDLMNKSFPELGIKKEDCRELSWIDTIIFYSGVVNYDTDNFNKEILLDRSAGQNGAFKIKLDYVKKPIPESVFVQILEKLYEEDIGAGMYALYPYGGIMDEISESAIPFPHRAGILYELWYICSWEKQEDNEKHLNWIRNIYNFMTPYVSKNPRLAYLNYRDLDIGINDPKNPNNYTQARIWGEKYFGKNFDRLVKVKTLVDPNNFFRNEQSIPPLPRHRH

SEQ ID NO: 859 - protein, 516 aa, Artificial Sequence
  Synthetic
NPRENFLKCFSQYIPNNATNLNLVYTQNNPLYMSVLNSTIHNLRFTSDTTPKPLVIVTPSQVSHIQATILCSKKVGLQIRTRSGGHDSEGMSYISQVPFVIVDLRNMRSIKIDVHSQTAWVEAGATLGEVYYWVNEKNENLSLAAGYCPTVCAGGHFGGGGYGPLMRNYGLAADNIIDAHLVNVNGKVLDRKSMGEDLFWALRGGGAESFGIIVAWKIRLVAVPKSTMFSVKKIMEIHELVKLVNKWQNIAYKYDKDLLLMTHFITRNITDNQGKNKTAIHTYFSSVFLGGVDSLVDLMNKSFPELGIKKEDCREMSWIDTIIFYSGVVNYDTDNFNKEILLDRSAGQNGAFKIKLDYVKKPIPESVFVQILEKLYEEDIGAGMYVLYPYGGIMDEISESAIPFPHRAGILYELWYICSWEKQEDNEKHLNWIRNIYNFMTPYVSKNPRLAYLNYRDLDIGINDPKNPNNYTQARIWGEKYFGKNFDRLVKVKTLVDPNNFFRNEQSIPPLPRHRH

SEQ ID NO: 860 - protein, 516 aa, Artificial Sequence
  Synthetic
NPRENFLKCFSQYIPNNATNLKLVYTQNNPLYMSVLNSTIHNLRFTSDTTPKPLVIVTPSHVSHIQATILCSKKVGLQIRTRSGGHDSEGMSYISQVPFVIVDLRNMRSIKIDVHSQTAWVEAGATLGEVYYWVNEKNENLSLAAGYCPTVCAGGHFGGGGYGPLMRNYGLAADNIIDAHLVNVHGKVLDRKSMGEDLFWALRGGGAESFGIIVAWKIRLVAVPKSTMFSVKKIMEIHELVKLVNKWQNIAYKYDKDLLLMTHFITRNITDNQGKNKTAIHTYFSSVFLGGVDSLVDLMNKSFPELGIKKEDCRELSWIDTIIFYSGVVNYDTDNFNKEILLDRSAGQNGAFKIKLDYVKKPIPESVFVQILEKLYEEDIGAGMYVLYPYGGIMDEISESAIPFPHRAGILYELWYICSWEKQEDNEKHLNWIRNIYNFMTPYVSKNPRLAYYNYRDLDIGINDPKNPNNYTQARIWGEKYFGKNFDRLVKVKTLVDPNNFFRNEQSIPPLPRHRH

SEQ ID NO: 861 - protein, 516 aa, Artificial Sequence
  Synthetic
NPRENFLKCFSQYIPNNATNLNLVYTQNNPLYMSVLNSTIQNLRFTSDTTPKPLVIVTPSHVSHIQGTILCAKKVGLQIRTRSGGHDSEGMSYISQVPFVIVDLRNMRSIKIDVHSQTAWVEAGATLGEVYYWVNEKNENLSLAAGYCPTVCAGGHFGGGGYGPLMRNYGLAADNIIDAHLVNVNGKVLDRKSMGEDLFWALRGGGAESFGIIVAWKIRLVAVPKSTMFSVKKIMEIHELVKLVNKWQNIAYKYDKDLLLMTHFITRNITDNQGKNKTAIHTYFSSVFLGGVDSLVDLMNKSFPELGIKKEDCREMSWIDTIIFYSGVVNYDTDNFNKEILLDRSAGQNGAFKIKLDYVKKPIPESVFVQILEKLYEEDIGAGMYALYPYGGIMDEISESAIPFPHRAGILYELWYICSWEKQEDNEKHLNWIRNIYNFMTPYVSKNPRLAYLNYRDLDIGINDPKNPNNYTQARIWGEKYFGKNFDRLVKVKTLVDPDNFFRNEQSIPPLPRHRH

SEQ ID NO: 862 - protein, 516 aa, Artificial Sequence
  Synthetic
NPRENFLKCFSQYIPNNATNLNLVYTQNNPLYMSVLNSTIQNLRFTSDTTPKPLVIVTPSHVSHIQGTILCAKKVGLQIRTRSGGHDSEGMSYISQVPFVIVDLRNMRSIKIDVHSQTAWVEAGATLGEVYYWVNEKNENLSLAAGYCPTVCAGGHFGGGGYGPLMRNYGLAADNIIDAHLVNVNGKVLDRKSMGEDLFWALRGGGAESFGIIVAWKIRLVAVPKSTMFSVKKIMEIHELVKLVNKWQNIAYKYDKDLLLMTHFITRNITDNQGKNKTAIHTYFSSVFLGGVDSLVDLMNKSFPELGIKKEDCREMSWIDTIIFYSGVVNYDTDNFNKEILLDRSAGQNGAFKIKLDYVKKPIPESVFVQILEKLYEEDIGAGMYALYPYGGIMDEISESAIPFPHRAGILYELWYICSWEKQEDNEKHLNWIRNIYNFMTPYVSKNPRLAYLNYRDLDIGINDPKNPNNYTQARIWGEKYFGKNFDRLVKVKTLVDPNNFFRNEQSIPPLPRHRH

SEQ ID NO: 863 - protein, 516 aa, Artificial Sequence
  Synthetic
NPRENFLKCFSQYIPNNATNLNLVYTQNNPLYMSVLNSTIHNLRFTSDTTPKPLVIVTPSHVSHIQATILCSKKVGLQIRTRSGGHDSEGMSYISQVPFVIVDLRNMRSIKIDVHSQTAWVEAGATLGEVYYWVNEKNENLSLAAGYCPTVCAGGHFGGGGYGPLMRNYGLAADNIIDAHLVNVNGKVLDRKSMGEDLFWALRGGGAESFGIIVAWKIRLVAVPKSTMFSVKKIMEIHELVKLVNKWQNIAYKYDKDLLLMTHFITRNITDNQGKNKTAIHTYFSSVFLGGVDSLVDLMNKSFPELGIKKEDCREMSWIDTIIFYSGVVNYDTDNFNKEILLDRSAGQNGAFKIKLDYVKKPIPESVFVQILEKLYEEDIGAGMYVLYPYGGIMDEISESAIPFPHRAGILYELWYICSWEKQEDNEKHLNWIRNIYNFMTPYVSKNPRLAYLNYRDLDIGINNPKNPNNYTQARIWGEKYFGKNFDRLVKVKTLVDPDNFFRNEQSIPPLPRHRH

SEQ ID NO: 864 - protein, 516 aa, Artificial Sequence
  Synthetic
NPRENFLKCFSQYIPNNATNLKLVYTQNNPLYMSVLNSTIHNLRFTSDTTPKPLVIVTPSHVSHIQATILCSKKVGLQIRTRSGGHDSEGMSYISQVPFVIVDLRNMRSIKIDVHSQTAWVEAGATLGEVYYWVNEKNENLSLAAGYCPTVCAGGHFGGGGYGPLMRNYGLAADNIIDAHLVNVHGKLLDRKSMGEDLFWALRGGGAESFGIIVAWKIRLVAVPKSTMFSVKKIMEIHELVKLVNKWQNIAYKYDKDLLLMTHFITRNITDNQGKNKTAIHTYFSSVFLGGVDSLVDLMNKSFPELGIKKEDCRELSWIDTIIFYSGVVNYDTDNFNKEILLDRSAGQNGAFKIKLDYVKKPIPESVFVQILEKLYEEDIGAGMYVLYPYGGIMDEISESAIPFPHRAGILYELWYICSWEKQEDNEKHLNWIRNIYNFMTPYVSKNPRLAYLNYRDLDIGINDPKNPNNYTQARIWGEKYFGKNFDRLVKVKTLVDPNNFFRNEQSIPPLPRHRH

SEQ ID NO: 865 - protein, 516 aa, Artificial Sequence
  Synthetic
NPRENFLKCFSQYIPNNATNLNLVYTQNNPLYMSVLNSTIHNLRFTSDTTPKPLVIVTPSHVSHIQGTILCSKKVGLQIRTRSGGHDAEGMSYISQVPFVIVDLRNMRSIKIDVHSQTAWVEAGATLGEVYYWVNEKNENLSLAAGYCPTVCAGGHFGGGGYGPLMRNYGLAADNIIDAHLVNVHGKVLDRKSMGEDLFWALRGGGAESFGIIVAWKIRLVAVPKSTMFSVKKIMEIHELVKLVNKWQNIAYKYDKDLLLMTHFITRNITDNQGKNKTAIHTYFSSVFLGGVDSLVDLMNKSFPELGIKKEDCRELSWIDTIIFYSGVVNYDTDNFNKEILLDRSAGQNGAFKIKLDYVKKPIPESVFVQILEKLYEEDIGAGMYALYPYGGIMDEISESAIPFPHRAGILYELWYICSWEKQEDNEKHLNWIRNIYNFMTPYVSKNPRLAYLNYRDLDIGINDPKNPNNYTQARIWGEKYFGKNFDRLVKVKTLVDPDNFFRNEQSIPPLPRHRH

SEQ ID NO: 866 - protein, 516 aa, Artificial Sequence
  Synthetic
NPRENFLKCFSQYIPNNATNLNLVYTQNNPLYMSVLNSTIHNLRFTSDTTPKPLVIVTPSHVSHIQATILCSKKVGLQIRTRSGGHDSEGMSYISQVPFVIVDLRNMRSIKIDVHSQTAWVEAGATLGEVYYWVNEKNENLSLAAGYCPTVCAGGHFGGGGYGPLMRNYGLAADNIIDAHLVNVNGKVLDRKSMGEDLFWALRGGGAESFGIIVAWKIRLVAVPKSTMFSVKKIMEIHELVKLVNKWQNIAYKYDKDLLLMTHFITRNITDNQGKNKTAIHTYFSSVFLGGVDSLVDLMNKSFPELGIKKEDCREMSWIDTIIFYSGVVNYDTDNFNKEILLDRSAGQPGAFKIKLDYVKKPIPESVFVQILEKLYEEDIGAGMYVLYPYGGIMDEISESAIPFPHRAGILYELWYICSWEKQEDNEKHLNWIRNIYNFMTPYVSKNPRLAYLNYRDLDIGINDPKNPNNYTQARIWGEKYFGKNFDRLVKVKTLVDPNNFFRNEQSIPPLPRHRH

SEQ ID NO: 867 - protein, 516 aa, Artificial Sequence
  Synthetic
NPRENFLKCFSQYIPNNATNLKLVYTQNNPLYMSVLNSTIHNLRFTSDTTPKPLVIVTPSHVSHIQATILCSKKVGLQIRTRSGGHDSEGMSYISQVPFVIVDLRNMRSIKIDVHSQTAWVEAGATLGEVYYWVNEKNENLSLAAGYCPTVCAGGHFGGGGYGPLMRNYGLAADNIIDAHLVNVHGKVLDRKSMGEDLFWALRGGGAESFGIIVAWKIRLVAVPKSTMFSVKKIMEIHELVKLVNKWQNIAYKYDKDLLLMTHFITRNITDNQGKNKTAIHTYFSSVFLGGVDSLVDLMNKSFPELGIKKEDCRELSWIDTIIFYSGVVNYDTDNFNKEILLDRSAGQNGAFKIKLDYVKKPIPESVFVQILEKLYEEDIGAGMYVLYPYGGIMDEISESAIPFPHRAGILYELWYICSWEKQEDNEKHLNWIRNIYNFMTPYVSKNPRLAYVNYRDLDIGINDPKNPNNYTQARIWGEKYFGKNFDRLVKVKTLVDPNNFFRNEQSIPPLPRHRH

SEQ ID NO: 868 - protein, 516 aa, Artificial Sequence
  Synthetic
NPRENFLKCFSQYIPNNATNLKLVYTQNNPLYMSVLNSTIHNLRFTSDTTPKPLVIVTPSHVSHIQGTILCSKKVGLQIRTRSGGHDSEGMSYISQVPFVIVDLRNMRSIKIDVHSQTAWVEAGATLGEVYYWVNEKNENLSLAAGYCPTVCAGGHFGGGGYGPLMRKYGLAADNIIDAHLVNVHGKVLDRKSMGEDLFWALRGGGAESFGIIVAWKIRLVAVPKSTMFSVKKIMEIHELVKLVNKWQNIAYKYDKDLLLMTHFITRNITDNQGKNKTAIHTYFSSVFLGGVDSLVDLMNKSFPELGIKKEDCRELSWIDTIIFYSGVVNYDTDNFNKEILLDRSAGQNGAFKIKLDYVKKPIPESVFVQILEKLYEEDIGAGMYALYPYGGIMDEISESAIPFPHRAGILYELWYICSWEKQEDNEKHLNWIRNIYNFMTPYVSKNPRLAYLNYRDLDIGINDPKNPNNYTQARIWGEKYFGKNFDRLVKVKTLVDPNNFFRNEQSIPPLPRHRH

SEQ ID NO: 869 - protein, 516 aa, Artificial Sequence
  Synthetic
NPRENFLKCFSQYIPNNATNLKLVYTQNNPLYMSVLNSTIHNLRFTSDTTPKPLVIVTPSHVSHIQGTILCSKKVGLQIRTRSGGHDSEGMSYISQVPFVIVDLRNMRSIKIDVHSQTAWVEAGATLGEVYYWVNEKNENLSLAAGYCPTVCAGGHFGGGGYGPLMRNYGLAADNIIDAHLVNVHGKVLDRKSMGEDLFWALRGGGAESFGIIVAWKIRLVAVPKSTMFSVKKIMEIHELVKLVNKWQNIAYKYDKDLLLMTHFITRNITDNQGKNKTAIHTYFSSVFLGGVDSLVDLMNKSFPELGIKKEDCRELSWIDTIIFYSGVVNYDTDNFNKEILLDRSAGQNGAYKIKLDYVKKPIPESVFVQILEKLYEEDIGAGMYALYPYGGIMDEISESAIPFPHRAGILYELWYICSWEKQEDNEKHLNWIRNIYNFMTPYVSKNPRLAYLNYRDLDIGINDPKNPNNYTQARIWGEKYFGKNFDRLVKVKTLVDPNNFFRNEQSIPPLPRHRH

SEQ ID NO: 870 - protein, 516 aa, Artificial Sequence
  Synthetic
NPRENFLKCFSQYIPNNATNLNLVYTQNNPLYMSVLNSTIHNLRFTSDTTPKPLVIVTPSHVSHIQATILCSKKVGLQIRTRSGGHDSEGMSYISQVPFVIVDLRNMRSIKIDVHSQTAWVEAGATLGEVYYWVNEKNENLSLAAGYCPTVCAGGHFGGGGYGPLMRNYGLAADNIIDAHLVNVHGKVLDRKSMGEDLFWALRGGGAESFGIIVAWKIRLVAVPKSTMFSVKKIMEIHELVKLVNKWQNIAYKYDKDLLLMTHFITRNITDNQGKNKTAIHTYFSSVFLGGVDSLVDLMNKSFPELGIKKEDCRELSWIDTIIFYSGVVNYDTDNFNKEILLDRSAGQNGAFKIKLDYVKKPIPESVFVQILEKLYEEDIGAGMYVLYPYGGIMDEISESAIPFPHRAGILYELWYICSWEKQEDNEKHLNWIRNIYNFMTPYVSKNPRLAYLNYRDLDIGINDPKNPNNYTQARIWGEKYFGKNFDRLVKVKTLVDPDNFFRNEQSIPPLPRHRH

SEQ ID NO: 871 - protein, 516 aa, Artificial Sequence
  Synthetic
NPRENFLKCFSQYIPNNATNLKLVYTQNNPLYMSVLNSTIHNLRFTSDTTPKPLVIVTPSHVSHIQATILCSKKVGLQIRTRSGGHDSEGMSYISQVPFVIVDLRNMRSIKIDVHSQTAWVEAGATLGEVYYWVNEKNENLSLAAGYCPTVCAGGHFGGGGYGPLMRNYGLAADNIIDAHLVNVHGKVLDRKSMGEDLFWALRGGGAESFGIIVAWKIRLVAVPKSTMFSVKKIMEIHELVKLVNKWQNIAYKYDKDLLLMTHFITRNITDNQGKNKTAIHTYFSSVFLGGVDSLVDLMNKSFPELGIKKEDCRELSWIDTIIFYSGVVNYDTDNFNKEILLDRSAGQNGAFKIKLDYVKKPIPESVFVQILEKLYEEDIGAGMYVLYPFGGIMDEISESAIPFPHRAGILYELWYICSWEKQEDNEKHLNWIRNIYNFMTPYVSKNPRLAYLNYRDLDIGINDPKNPNNYTQARIWGEKYFGKNFDRLVKVKTLVDPNNFFRNEQSIPPLPRHRH

SEQ ID NO: 872 - protein, 516 aa, Artificial Sequence
  Synthetic
NPRENFLKCFSQYIPNNATNLKLVYTQNNPLYMSVLNSTIHNLRFTSDTTPKPLVIVTPSHVSHIQATILCSKKVGLQIRTRSGGHDSEGMSYISQVPFVIVDLRNMRSIKIDVHSQTAWVEAGATLGEVYYWVNEKNENLSLAAGYCPTVCAGGHFGGGGYGPLMRNYGLAADNIIDAHLVNVHGKVLDRKSMGEDLFWALRGGGAESFGIIVAWKIRLVAVPKSTMFSVKKIMEIHELVKLVNKWQNIAYKYDKDLLLMTHFITRNITDNQGKNKTAIHTYFSSVFLGGVDELVDLMNKSFPELGIKKEDCRELSWIDTIIFYSGVVNYDTDNFNKEILLDRSAGQNGAFKIKLDYVKKPIPESVFVQILEKLYEEDIGAGMYVLYPYGGIMDEISESAIPFPHRAGILYELWYICSWEKQEDNEKHLNWIRNIYNFMTPYVSKNPRLAYLNYRDLDIGINDPKNPNNYTQARIWGEKYFGKNFDRLVKVKTLVDPNNFFRNEQSIPPLPRHRH

SEQ ID NO: 873 - protein, 516 aa, Artificial Sequence
  Synthetic
NPRENFLKCFSQYIPNNATNLNLVYTQNNPLYMSVLNSTIHNLRFTSDTTPKPLVIVTPSHVSHIQGTILCSKKVGLQIRTRSGGHDAEGMSYISQVPFVIVDLRNMRSIKIDVHSQTAWVEAGATLGEVYYWVNEKNENLSLAAGYCPTVCAGGHFGGGGYGPLMRNYGLAADNIIDAHLVNVNGKVLDRKSMGEDLFWALRGGGAESFGIIVAWKIRLVAVPKSTMFSVKKIMEIHELVKLVNKWQNIAYKYDKDLLLMTHFITRNITDNQGKNKTAIHTYFSSVFLGGVDSLVDLMNKSFPELGIKKEDCREMSWIDTIIFYSGVVNYDTDNFNKEILLDRSAGQNGAFKIKLDYVKKPIPESVFVQILEKLYEEDIGAGMYALYPYGGIMDEISESAIPFPHRAGILYELWYICSWEKQEDNEKHLNWIRNIYNFMTPYVSKNPRLAYLNYRDLDIGINDPKNPNNYTQARIWGEKYFGKNFDRLVKVKTLVDPDNFFRNEQSIPPLPRHRH

SEQ ID NO: 874 - protein, 516 aa, Artificial Sequence
  Synthetic
NPRENFLKCFSQYIPNNATNLKLVYTQNNPLYMSVLNSTIHNLRFTSDTTPKPLVIVTPSHVSHIQGTILCSKKVGLQIRTRSGGHDSEGMSYISQVPFVIVDLRNMRSIKIDVHSQTAWVEAGATLGEVYYWVNEKNENLSLAAGYCPTVCAGGHFGGGGYGPLMRNYGLAADNIIDAHLVNVHGKVLDRKSMGEDLFWALRGGGAESFGIIVAWKIRLVAVPKSTMFSVKKIMEIHELVKLVNKWQNIAYKYDKDLLLMTHFITRNITDNQGKNKTAIHTYFSSVFLGGVDSLVDLMNKSFPELGIKKEDCREMSWIDTIIFYSGVVNYDTDNFNKEILLDRSAGQNGAFKIKLDYVKKPIPESVFVQILEKLYEEDIGAGMYALYPYGGIMDEISESAIPFPHRAGILYELWYICSWEKQEDNEKHLNWIRNIYNFMTPYVSKNPRLAYLNYRDLDIGINDPKNPNNYTQARIWGEKYFGKNFDRLVKVKTLVDPDNFFRNEQSIPPLPRHRH

SEQ ID NO: 875 - protein, 516 aa, Artificial Sequence
  Synthetic
NPRENFLKCFSQYIPNNATNLNLVYTQNNPLYMSVLNSTIHNLRFTSDTTPKPLVIVTPSHVSHIQATILCSKKVGLQIRTRSGGHDSEGMSYISQVPFVIVDLRNMRSIKIDVHSQTAWVEAGATLGEVYYWVNEKNENLSLAAGYCPTVCAGGHFGGGGYGPLMRNYGLAADNIIDAHLVNVNGKVLDRKSMGEDLFWALRGGGAESFGIIVAWKIRLVAVPKSTMFSVKKIMEIHELVKLVNKWQNIAYKYDKDLLLMMHFITRNITDNQGKNKTAIHTYFSSVFLGGVDSLVDLMNKSFPELGIKKEDCREMSWIDTIIFYSGVVNYDTDNFNKEILLDRSAGQNGAFKIKLDYVKKPIPESVFVQILEKLYEEDIGAGMYVLYPYGGIMDEISESAIPFPHRAGILYELWYICSWEKQEDNEKHLNWIRNIYNFMTPYVSKNPRLAYLNYRDLDIGINDPKNPNNYTQARIWGEKYFGKNFDRLVKVKTLVDPNNFFRNEQSIPPLPRHRH

SEQ ID NO: 876 - protein, 516 aa, Artificial Sequence
  Synthetic
NPRENFLKCFSQYIPNNATNLKLVYTQNNPLYMSVLNSTIHNLRFTSDTTPKPLVIVTPSHVSHIQATILCSKKVGLQIRTRSGGHDSEGMSYISQVPFVIVDLRNMRSIKIDVHSQTAWVEAGATLGEVYYWVNEKNENLSLAAGYCPTVCAGGHFGGGGYGPLMRNYGLAADNIIDAHLVNVHGKVLDRKSMGEDLFWALRGGGAESFGIIVAWKIRLVAVPKSTMFSVKKIMEIHELVKLVNKWQNIAYKYDKDLLLMTHFITRNITDNQGKNKTAIHTYFSSVFLGGVDSLVDLMNKSFPELGIKKEDCRELSWIDTIIFYSGVVNYDTDNFNKEILLDRSAGSNGAFKIKLDYVKKPIPESVFVQILEKLYEEDIGAGMYVLYPYGGIMDEISESAIPFPHRAGILYELWYICSWEKQEDNEKHLNWIRNIYNFMTPYVSKNPRLAYLNYRDLDIGINDPKNPNNYTQARIWGEKYFGKNFDRLVKVKTLVDPNNFFRNEQSIPPLPRHRH

SEQ ID NO: 877 - protein, 516 aa, Artificial Sequence
  Synthetic
NPRENFLKCFSQYIPNNATNLKLVYTQNNPLYMSVLNSTIHNLRFTSDTTPKPLVIVTPSHVSHIQGTILCSKKVGLQIRTRSGGHDSEGMSYISQVPFVIVDLRNMRSIKIDVHSQTAWVEAGATLGEVYYWVNEKNENLSLAAGYCPTVCAGGHFGGGGYGPLMRNYGLAADNIIDAHLVNVNGKVLDRKSMGEDLFWALRGGGAESFGIIVAWKIRLVAVPKSTMFSVKKIMEIHELVKLVNKWQNIAYKYDKDLLLMTHFITRNITDNQGKNKTAIHTYFSSVFLGGVDSLVDLMNKSFPELGIKKEDCREMSWIDTIIFYSGVVNYDTDNFNKEILLDRSAGQNGAFKIKLDYVKKPIPESVFVQILEKLYEEDIGAGMYALYPYGGIMDEISESAIPFPHRAGILYELWYICSWEKQEDNEKHLNWIRNIYNFMTPYVSKNPRLAYLNYRDLDIGINDPKNPNNYTQARIWGEKYFGKNFDRLVKVKTLVDPDNFFRNEQSIPPLPRHRH

SEQ ID NO: 878 - protein, 516 aa, Artificial Sequence
  Synthetic
NPRENFLKCFSQYIPNNATNLKLVYTQNNPLYMSVLNSTIHNLRFTSDTTPKPLVIVTPSHVSHIQATILCSKKVGLQIRTRSGGHDSEGMSYISQVPFVIVDLRNMRSIKIDVHSQTAWVEAGATLGEVYYWVNEKNENLSLAAGYCPTVCAGGHFGGGGYGPLMRNYGLAADNIIDAHLVNVHGKVLDRKSMGEDLFWALRGGGAESFGIIVAWKIRLVAVPKSTMFSVKKIMEIHELVKLVHKWQNIAYKYDKDLLLMTHFITRNITDNQGKNKTAIHTYFSSVFLGGVDSLVDLMNKSFPELGIKKEDCRELSWIDTIIFYSGVVNYDTDNFNKEILLDRSAGQNGAFKIKLDYVKKPIPESVFVQILEKLYEEDIGAGMYVLYPYGGIMDEISESAIPFPHRAGILYELWYICSWEKQEDNEKHLNWIRNIYNFMTPYVSKNPRLAYLNYRDLDIGINDPKNPNNYTQARIWGEKYFGKNFDRLVKVKTLVDPNNFFRNEQSIPPLPRHRH

SEQ ID NO: 879 - protein, 516 aa, Artificial Sequence
  Synthetic
NPRENFLKCFSQYIPNNATNLKLVYTQNNPLYMSVLNSTIHNLRFTSDTTPKPLVIVTPSHVSHIQATILCSKKVGLQIRTRSGGHDSEGMSYISQVPFVIVDLRNMRSIKIDVHSQTAWVEAGATLGEVYYWVNEKNENLSLAAGYCPTVCAGGHFGGGGYGPLMRNYGLAADNIIDAHLVNVHGKVLDRKSMGEDLFWALRGGGAESFGIIVAWKIRLVAVPKSTMFSVKKIMEIHELVKLVNKWQNIAYKYDKDLLLMTHFITRNITDNQGKNKTAIHTYFSSVFLGGVDSLVDLMNKSFPELGIKKEDCRELSWIDTIIFYSGVVNYDTDNFNKEILLDRSAGQNGAFKIKLDYVKKPIPESVFVQILEKLYEEDIGAGMYVLYPYGGIMDEISESAIPFPHRAGILYELWYICSWEKQEDNEKHLNWIRNIYNFMTPYVSKNPRLAYMNYRDLDIGINDPKNPNNYTQARIWGEKYFGKNFDRLVKVKTLVDPNNFFRNEQSIPPLPRHRH

SEQ ID NO: 880 - protein, 516 aa, Artificial Sequence
  Synthetic
NPRENFLKCFSQYIPNNATNLNLVYTQNNPLYMSVLNSTIHNLRFTSDTTPKPLVIVTPSHVSHIQATILCSKKVGLQIRTRSGGHDSEGMSYISQVPFVIVDLRNMRSIKIDVHSQTAWVEAGATLGEVYYWVNEKNENLSLAAGYCPTVCAGGHFGGGGYGPLMRNYGLAADNIIDAHLVNVNGKVLDRKSMGEDLFWALRGGGAESFGIIVAWKIRLVAVPKSTMFSVKKIMEIHELVKLVNKWQNIAYKYDKDLLLMTHFITRNITDNQGKNKTAIHTYFSSVFLGGVDSLVDLMNKSFPELGIKKEDCREMSWIDTIIYYSGVVNYDTDNFNKEILLDRSAGQNGAFKIKLDYVKKPIPESVFVQILEKLYEEDIGAGMYVLYPYGGIMDEISESAIPFPHRAGILYELWYICSWEKQEDNEKHLNWIRNIYNFMTPYVSKNPRLAYLNYRDLDIGINDPKNPNNYTQARIWGEKYFGKNFDRLVKVKTLVDPNNFFRNEQSIPPLPRHRH

SEQ ID NO: 881 - protein, 516 aa, Artificial Sequence
  Synthetic
NPRENFLKCFSQYIPNNATNLNLVYTQNNPLYMSVLNSTIHNLRFTSDTTPKPLVIVTPSHVSHIQATILCSKKVGLQIRTRSGGHDSEGMSYISQVPFVIVDLRNMRSIKIDVHSQTAWVEAGATLGEVYYWVNEKNENLSLAAGYCPTVCAGGHFGGGGYGPLMRNYGLAADNIIDAHLVNVHGKVLDRKSMGEDLFWALRGGGAESFGIIVAWKIRLVAVPKSTMFSVKKIMEIHELVKLVNKWQNIAYKYDKDLLLMTHFITRNITDNQGKNKTAIHTYFSSVFLGGVDSLVDLMNKSFPELGIKKEDCRELSWIDTIIFYSGVVNYDTDNFNKEILLDRSAGQNGAFKIKLDYVKKPIPESVFVQILEKLYEEDIGAGMYVLYPYGGIMDEISESAIPFPHRAGILYELWYICSWEKQEDNEKHLNWIRNIYNFMTPYVSKNPRLAYLNYRDLDIGINDPKNPNNYTQARIWGEKYFGKNFDRLVKVKTLVDPNNFFRNEQSIPPLPRHRH

SEQ ID NO: 882 - protein, 516 aa, Artificial Sequence
  Synthetic
NPRENFLKCFSQYIPNNATNLNLVYTQNNPLYMSVLNSTIHNLRFTSDTTPKPLVIVTPSHVSHIQATILCSKKVGLQIRTRSGGHDSEGMSYISQVPFVIVDLRNMRSIKIDVHSQTAWVEAGATLGEVYYWVNEKNENLSLAAGYCPTVCAGGHFGGGGYGPLMRNYGLAADNIIDAHLVNVNGKVLDRKSMGEDLFWALRGGGAESFGIIVAWKIRLVAVPKSTMFSVKKIMEIHELVKLVNKWQNIAYKYDKDLLLMTHFITRNITDNQGKNKTAIHTYFSSVFLGGVDSLVDLMNKSFPELGIKKEDCREMSWIDTIIFYSGVVNYDTDNFNKEILLDRSAGQNGAFKIKLDYVKKPIPESVFVQILEKLYEEDIGAGMYVLYPYGGIMDEISESAIPFPHRAGILYELWYVCSWEKQEDNEKHLNWIRNIYNFMTPYVSKNPRLAYLNYRDLDIGINDPKNPNNYTQARIWGEKYFGKNFDRLVKVKTLVDPNNFFRNEQSIPPLPRHRH

SEQ ID NO: 883 - protein, 516 aa, Artificial Sequence
  Synthetic
NPRENFLKCFSQYIPNNATNLKLVYTQNNPLYMSVLNSTIHNLRFTSDTTPKPLVIVTPSHVSHIQGTILCSKKVGLQIRTRSGGHDSEGMSYISQVPFVIVDLRNMRSIKIDVHSQTAWVEAGATLGEVYYWVNEKNENLSLAAGYCPTVCAGGHFGGGGYGPLMRNYGLAADNIIDAHLVNVHGKVLDRKSMGEDLFWALRGGGAESFGIIVAWKIRLVAVPKSTMFSVKKIMEIHELVKLVNKWQNIAYKYDKDLLLMTHFITRNITDNQGKNKTAIHTYFSSVFLGGVDSLVDLMNKSFPELGIKKEDCRELSWIDTIIFYSGVVNYDTDNFNKEILLDRSAGQNGAFKIKLDYVKKPIPESVFVQILEKLYEEDIGAGMYALYPYGGIMDEISESAIPFPHRAGILYEIWYICSWEKQEDNEKHLNWIRNIYNFMTPYVSKNPRLAYLNYRDLDIGINDPKNPNNYTQARIWGEKYFGKNFDRLVKVKTLVDPNNFFRNEQSIPPLPRHRH

SEQ ID NO: 884 - protein, 517 aa, Artificial Sequence
  Synthetic
NPQENFLKCFSKHIPNNVANPKLVYTQNDSLYSSILNSTIQNLRFTSDTTPKPLVIVTPSNVSHIQATILCSKKVGLQIRTRSGGHDAEGMSYISQVPFVVVDLRNMHSIKIDVHSQTAWVEAGATLGEVYYWINEKNENLSFPGGYCPTVGVGGHFSGGGYGALMRNYGLAADNIIDAHLVNVDGKVLDRKSMGEDLFWAIRGGGGENFGIIAAWKIKLVPVPSKVTIFSVKKNMEIHGLVKLFNKWQNIAYKYDKDLLLMTHFITKNITDNHGKNKTTVHGYFSSIFHGGVDSLVDLMNKSFPELGIKKTDCKELSWIDTTIFYSGVVNFNTANFKKEILLDRSAGKKTAFSIKLDYVKKPIPETAMVKILEKLYEEDVGAGMYVLYPYGGIMDEISESAIPFPHRAGIMYELWYTASWEKQEDNEKHINWVRSVYNFTTPYVSKNPRLAYLNYRDLDLGKNNEESPNNYTQARIWGEKYFGKNFNRLVKVKTKVDPNNFFRNEQSIPPLPPHHH

SEQ ID NO: 885 - protein, 517 aa, Artificial Sequence
  Synthetic
NPQENFLKCFSKHIPNNVTNPKLVYTQNDSLYSSILNSTIQNLRFTSDTTPKPLVIVTPSNVSHIQATILCSKKVGLQIRTRSGGHDAEGMSYISQVPFVVVDLRNMHSIKIDVHSQTAWVEAGATLGEVYYWINEKNENLSFPGGYCPTVGVGGHFSGGGYGALMRNYGLAADNIIDAHLVNVDGKVLDRKSMGEDLFWAIRGGGGENFGIIAAWKIKLVPVPSKVTIFSVKKNMEIHGLVKLFNKWQNIAYKYDKDLVLMTHFITKNITDNHGKNKTTVHGYFSSIFHGGVDSLVDLMNKSFPELGIKKEDCKELSWIDTTIFYSGVVNFNTANFKKEILLDRSAGKKTAFSIKLDYVKKPIPETAMVKILEKLYEEDVGAGMYVLYPYGGIMDEISESAIPFPHRAGIMYELWYTASWEKQEDNEKHINWVRSVYNFTTPYVSKNPRLAYLNYRDLDLGKNNEESPNNYTQARIWGEKYFGKNFNRLVKVKTKVDPNNFFRNEQSIPPLPPHHH

SEQ ID NO: 886 - protein, 517 aa, Artificial Sequence
  Synthetic
NPQENFLKCFSKHIPNNVANPKLVYTQNDSLYSSILNSTIQNLRFTSDTTPKPLVIVTPSNVSHIQATILCSKKVGLQIRTRSGGHDAEGMSYISQVPFVVVDLRNMHSIKIDVESQTAWVEAGATLGEVYYWINEKNENLSFPGGYCPTVGVGGHFSGGGYGALMRNYGLAADNIIDAHLVNVDGKVLDRKSMGEDLFWAIRGGGGENFGIIAAWKIKLVPVPSKVTIFSVKKNMEIHGLVKLFNKWQNIAYKYDKDLLLMTHFITKNITDNHGKNKTTVHGYFSSIFHGGVDSLVDLMNKSFPELGIKKEDCKELSWIDTTIFYSGVVNFNTANFKKEILLDRSAGKKTAFSIKLDYVKKPIPETAMVKILEKLYEEDVGAGMYVLYPYGGIMEEISESAIPFPHRAGIMYELWYTASWEKQEDNEKHINWVRSVYNFTTPYVSKNPRLAYLNYRDLDLGKNNEESPNNYTQARIWGEKYFGKNFNRLVKVKTKVDPNNFFRNEQSIPPLPPHHH

SEQ ID NO: 887 - protein, 517 aa, Artificial Sequence
  Synthetic
NPQENFLKCFSKHIPNNVANPKLVYTQNDQLYSSILNSTIQNLRFTSDTTPKPLVIVTPSNVSHIQATILCSKKVGLQIRTRSGGHDAEGMSYISQVPFVVVDLRNMHSIKIDVHSQTAWVEAGATLGEVYYWINEKNENLSFPGGYCPTVGVGGHFSGGGYGALMRNYGLAADNIIDAHLVNVDGKVLDRKSMGEDLFWAIRGGGGENFGIIAAWKIKLVPVPSKVTIFSVKKNMEIHGLVKLFNKWQNIAYKYDKDLVLMTHFITKNITDNHGKNKTTVHGYFSSIFHGGVDSLVDLMNKSFPELGIKKEDCKELSWIDTTIFYSGVVNFNTANFKKEILLDRSAGKKTAFSIKLDYVKKPIPETAMVKILEKLYEEDVGAGMYVLYPYGGIMEEISESAIPFPHRAGIMYELWYTASWEKQEDNEKHINWVRSVYNFTTPYVSKNPRLAYLNYRDLDLGKNNEESPNNYTQARIWGEKYFGKNFNRLVKVKTKVDPNNFFRNEQSIPPLPPHHH

SEQ ID NO: 888 - protein, 517 aa, Artificial Sequence
  Synthetic
NPQENFLKCFSKHIPNNVTNPKLVYTQNDQLYSSILNSTIQNLRFTSDTTPKPLVIVTPSNVSHIQATILCSKKVGLQIRTRSGGHDAEGMSYISQVPFVVVDLRNMHSIKIDVHSQTAWVEAGATLGEVYYWINEKNENLSFPGGYCPTVGVGGHFSGGGYGALMRNYGLAADNIIDAHLVNVDGKVLDRKSMGEDLFWAIRGGGGENFGIIAAWKIKLVPVPSKVTIFSVKKNMEIHGLVKLFNKWQNIAYKYDKDLVLMTHFITKNITDNHGKNKTTVHGYFSSIFHGGVDSLVDLMNKSFPELGIKKTDCKELSWIDTTIFYSGVVNFNTANFKKEILLDRSAGKKTAFSIKLDYVKKPIPETAMVKILEKLYEEDVGAGMYVLYPYGGIMEEISESAIPFPHRAGIMYELWYTASWEKQEDNEKHINWVRSVYNFTTPYVSKNPRLAYLNYRDLDLGKNNEESPNNYTQARIWGEKYFGKNFNRLVKVKTKVDPNNFFRNEQSIPPLPPHHH

SEQ ID NO: 889 - protein, 517 aa, Artificial Sequence
  Synthetic
NPQENFLKCFSKHIPNNVANPKLVYTQNDSLYSSILNSTIQNLRFTSDTTPKPLVIVTPSNVSHIQATILCSKKVGLQIRTRSGGHDAEGMSYISQVPFVVVDLRNMHSIKIDVHSQTAWVEAGATLGEVYYWINEKNENLSFPGGYCPTVGVGGHFSGGGYGALMRNYGLAADNIIDAHLVNVDGKVLDRKSMGEDLFWAIRGGGGENFGIIAAWKIKLVPVPSKVTIFSVKKNMEIHGLVKLFNKWQNIAYKYDKDLVLMTHFITKNITDNHGKNKTTVHGYFSSIFHGGVDSLVDLMNKSFPELGIKKTDCKELSWIDTTIFYSGVVNFNTANFKKEILLDRSAGKKTAFSIKLDYVKKPIPETAMVKILEKLYEEDVGAGMYVLYPYGGIMDEISESAIPFPHRAGIMYELWYTASWEKQEDNEKHINWVRSVYNFTTPYVSKNPRLAYLNYRDLDLGKNNEESPNNYTQARIWGEKYFGKNFNRLVKVKTKVDPNNFFRNEQSIPPLPPHHH

SEQ ID NO: 890 - protein, 517 aa, Artificial Sequence
  Synthetic
NPRENFLKCFSKHIPNNVTNPKLVYTQNDSLYSSILNSTIQNLRFTSDTTPKPLVIVTPSNVSHIQATILCSKKVGLQIRTRSGGHDAEGMSYISQVPFVVVDLRNMHSIKIDVHSQTAWVEAGATLGEVYYWINEKNENLSFPGGYCPTVGVGGHFSGGGYGALMRNYGLAADNIIDAHLVNVDGKVLDRKSMGEDLFWAIRGGGGENFGIIAAWKIKLVDVPSKVTIFSVKKNMEIHGLVKLFNKWQNIAYKYDKDLLLMTHFITKNITDNHGKNKTTVHGYFSSIFHGGVDSLVDLMNKSFPELGIKKTDCKELSWIDTTIFYSGVVNFNTANFKKEILLDRSAGKKTAFSIKLDYVKKPIPETAMVKILEKLYEEDVGAGMYVLYPYGGIMEEISESAIPFPHRAGIMYELWYTASWEKQEDNEKHINWVRSVYNFTTPYVSKNPRLAYLNYRDLDLGKNNEESPNNYTQARIWGEKYFGKNFNRLVKVKTKVDPNNFFRNEQSIPPLPPHHH

SEQ ID NO: 891 - protein, 517 aa, Artificial Sequence
  Synthetic
NPRENFLKCFSKHIPNNVANPKLVYTQNDSLYSSILNSTIQNLRFTSDTTPKPLVIVTPSNVSHIQATILCSKKVGLQIRTRSGGHDAEGMSYISQVPFVVVDLRNMHSIKIDVESQTAWVEAGATLGEVYYWINEKNENLSFPGGYCPTVGVGGHFSGGGYGALMRNYGLAADNIIDAHLVNVDGKVLDRKSMGEDLFWAIRGGGGENFGIIAAWKIKLVDVPSKVTIFSVKKNMEIHGLVKLFNKWQNIAYKYDKDLLLMTHFITKNITDNHGKNKTTVHGYFSSIFHGGVDSLVDLMNKSFPELGIKKTDCKELSWIDTTIFYSGVVNFNTANFKKEILLDRSAGKKTAFSIKLDYVKKPIPETAMVKILEKLYEEDVGAGMYVLYPYGGIMEEISESAIPFPHRAGIMYELWYTASWEKQEDNEKHINWVRSVYNFTTPYVSKNPRLAYLNYRDLDLGKNNEESPNNYTQARIWGEKYFGKNFNRLVKVKTKVDPNNFFRNEQSIPPLPPHHH

SEQ ID NO: 892 - protein, 517 aa, Artificial Sequence
  Synthetic
NPRENFLKCFSKHIPNNVANPKLVYTQNDSLYSSILNSTIQNLRFTSDTTPKPLVIVTPSNVSHIQATILCSKKVGLQIRTRSGGHDAEGMSYISQVPFVVVDLRNMHSIKIDVESQTAWVEAGATLGEVYYWINEKNENLSFPGGYCPTVGVGGHFSGGGYGALMRNYGLAADNIIDAHLVNVDGKVLDRKSMGEDLFWAIRGGGGENFGIIAAWKIKLVDVPSKVTIFSVKKNMEIHGLVKLFNKWQNIAYKYDKDLVLMTHFITKNITDNHGKNKTTVHGYFSSIFHGGVDSLVDLMNKSFPELGIKKEDCKELSWIDTTIFYSGVVNFNTANFKKEILLDRSAGKKTAFSIKLDYVKKPIPETAMVKILEKLYEEDVGAGMYVLYPYGGIMEEISESAIPFPHRAGIMYELWYTASWEKQEDNEKHINWVRSVYNFTTPYVSKNPRLAYLNYRDLDLGKNNEESPNNYTQARIWGEKYFGKNFNRLVKVKTKVDPNNFFRNEQSIPPLPPHHH

SEQ ID NO: 893 - protein, 517 aa, Artificial Sequence
  Synthetic
NPQENFLKCFSKHIPNNVANPKLVYTQNDSLYSSILNSTIQNLRFTSDTTPKPLVIVTPSNVSHIQATILCSKKVGLQIRTRSGGHDAEGMSYISQVPFVVVDLRNMHSIKIDVHSQTAWVEAGATLGEVYYWINEKNENLSFPGGYCPTVGVGGHFSGGGYGALMRNYGLAADNIIDAHLVNVDGKVLDRKSMGEDLFWAIRGGGGENFGIIAAWKIKLVPVPSKVTIFSVKKNMEIHGLVKLFNKWQNIAYKYDKDLVLMTHFITKNITDNHGKNKTTVHGYFSSIFHGGVDSLVDLMNKSFPELGIKKTDCKELSWIDTTIFYSGVVNFNTANFKKEILLDRSAGKKTAFSIKLDYVKKPIPETAMVKILEKLYEEDVGVGMYVLYPYGGIMEEISESAIPFPHRAGIMYELWYTASWEKQEDNEKHINWVRSVYNFTTPYVSKNPRLAYLNYRDLDLGKNNEESPNNYTQARIWGEKYFGKNFNRLVKVKTKVDPNNFFRNEQSIPPLPPHHH

SEQ ID NO: 894 - protein, 517 aa, Artificial Sequence
  Synthetic
NPRENFLKCFSKHIPNNVANPKLVYTQNDQLYSSILNSTIQNLRFISDTTPKPLVIVTPSHVSHIQATILCAKKVGLQIRTRSGGHDAEGMSYISQVPFVVVDLRNMHSIKIDVHSQTAWVQAGATLGEVYYWINEKNENLSFPGGYCPTVGVGGHFSGGGYGALMRKYGLAADNIIDAHLVDVDGKVLDRKSMGEDLFWAIRGGGGENFGIIAAWKIKLVDVPSKVTIFSVKKNMEIHGLVKLFHKWQNIAYKYDKDLVLMTHFITKNITDNHGKNKTTVHGYFSSIFHGGVDSLVDLMNKSFPELGIKKTDCKEMSWIDTTIFYSGVVNFNTANFKKEILLDRSAGKKTAFSIKLDYVKKPIPETAMVKILEKLYEEDVGAGMYVLYPYGGIMEEISESAIPFPHRAGIMYELWYTASWEKQEDNEKHINWVRSVYNFTTPYVSKNPRLAYLNYRDLDLGKNNHESPNNYTQARIWGEKYFGKNFNRLVKVKTKVDPNNFFRNEQSIPPLPPHHH

SEQ ID NO: 895 - protein, 517 aa, Artificial Sequence
  Synthetic
NPQENFLKCFSKHIPNNVANPKLVYTQNDSLYSSILNSTIQNLRFTSDTTPKPLVIVTPSNVSHIQATILCSKKVGLQIRTRSGGHDAEGMSYISQVPFVVVDLRNMHSIKIDVESQTAWVEAGATLGEVYYWINEKNENLSFPGGYCPTVGVGGHFSGGGYGALMRNYGLAADNIIDAHLVNVDGKVLDRKSMGEDLFWAIRGGGGENFGIIAAWKIKLVPVPSKVTIFSVKKNMEIHGLVKLFNKWQNIAYKYDKDLLLMTHFITKNITDNHGKNKTTVHGYFSSIFHGGVDSLVDLMNKSFPELGIKKTDCKELSWIDTTIFYSGVVNFNTANFKKEILLDRSAGKKTAFSIKLDYVKKPIPETAMVKILEKLYEEDVGAGMYVLYPYGGIMEEISESAIPFPHRAGIMYELWYTASWEKQEDNEKHINWVRSVYNFTTPYVSKNPRLAYLNYRDLDLGKNNEESPNNYTQARIWGEKYFGKNFNRLVKVKTKVDPNNFFRNEQSIPPLPPHHH

SEQ ID NO: 896 - protein, 517 aa, Artificial Sequence
  Synthetic
NPRENFLKCFSKHIPNNVANPKLIYTQNDSLYSSILNSTIQNLRFTSDTTPKPLVIVTPSNVSHIQATILCSKKVGLQIRTRSGGHDAEGMSYISQVPFVVVDLRNMHSIKIDVHSQTAWVEAGATLGEVYYWINEKNENLSFPGGYCPTVGVGGHFSGGGYGALMRNYGLAADNIIDAHLVNVDGKVLDRKSMGEDLFWAIRGGGGENFGIIAAWKIKLVDVPSKVTIFSVKKNMEIHGLVKLFNKWQNIAYKYDKDLLLMTHFITKNITDNHGKNKTTVHGYFSSIFHGGVDSLVDLMNKSFPELGIKKTDCKELSWIDTTIFYSGVVNFNTANFKKEILLDRSAGKKTAFSIKLDYVKKPIPETAMVKILEKLYEEDVGAGMYVLYPYGGIMEEISESAIPFPHRAGIMYELWYTASWEKQEDNEKHINWVRSVYNFTTPYVSKNPRLAYLNYRDLDLGKNNEESPNNYTQARIWGEKYFGKNFNRLVKVKTKVDPNNFFRNEQSIPPLPPHHH

SEQ ID NO: 897 - protein, 517 aa, Artificial Sequence
  Synthetic
NPQENFLKCFSKHIPNNVANPKLVYTQNDQLYSSILNSTIQNLRFTSDTTPKPLVIVTPSNVSHIQATILCSKKVGLQIRTRSGGHDAEGMSYISQVPFVVVDLRNMHSIKIDVESQTAWVEAGATLGEVYYWINEKNENLSFPGGYCPTVGVGGHFSGGGYGALMRNYGLAADNIIDAHLVNVDGKVLDRKSMGEDLFWAIRGGGGENFGIIAAWKIKLVPVPSKVTIFSVKKNMEIHGLVKLFNKWQNIAYKYDKDLVLMTHFITKNITDNHGKNKTTVHGYFSSIFHGGVDSLVDLMNKSFPELGIKKTDCKELSWIDTTIFYSGVVNFNTANFKKEILLDRSAGKKTAFSIKLDYVKKPIPETAMVKILEKLYEEDVGAGMYVLYPYGGIMEEISESAIPFPHRAGIMYELWYTASWEKQEDNEKHINWVRSVYNFTTPYVSKNPRLAYLNYRDLDLGKNNEESPNNYTQARIWGEKYFGKNFNRLVKVKTKVDPNNFFRNEQSIPPLPPHHH

SEQ ID NO: 898 - protein, 517 aa, Artificial Sequence
  Synthetic
NPQENFLKCFSKHIPNNVANPKLVYTQNDSLYSSILNSTIQNLRFTSDTTPKPLVIVTPSNVSHIQATILCSKKVGLQIRTRSGGHDAEGMSYISQVPFVVVDLRNMHSIKIDVESQTAWVEAGATLGEVYYWINEKNENLSFPGGYCPTVGVGGHFSGGGYGALMRNYGLAADNIIDAHLVNVDGKVLDRKSMGEDLFWAIRGGGGENFGIIAAWKIKLVPVPSKVTIFSVKKNMEIHGLVKLFNKWQNIAYKYDKDLVLMTHFITKNITDNHGKNKTTVHGYFSSIFHGGVDSLVDLMNKSFPELGIKKTDCKELSWIDTTIFYSGVVNFNTANFKKEILLDRSAGKKTAFSIKLDYVKKPIPETAMVKILEKLYEEDVGAGMYVLYPYGGIMDEISESAIPFPHRAGIMYELWYTASWEKQEDNEKHINWVRSVYNFTTPYVSKNPRLAYLNYRDLDLGKNNEESPNNYTQARIWGEKYFGKNFNRLVKVKTKVDPNNFFRNEQSIPPLPPHHH

SEQ ID NO: 899 - protein, 517 aa, Artificial Sequence
  Synthetic
NPQENFLKCFSKHIPNNVANAKLVYTQNDSLYSSILNSTIQNLRFTSDTTPKPLVIVTPSNVSHIQATILCSKKVGLQIRTRSGGHDAEGMSYISQVPFVVVDLRNMHSIKIDVHSQTAWVEAGATLGEVYYWINEKNENLSFPGGYCPTVGVGGHFSGGGYGALMRNYGLAADNIIDAHLVNVDGKVLDRKSMGEDLFWAIRGGGGENFGIIAAWKIKLVPVPSKVTIFSVKKNMEIHGLVKLFNKWQNIAYKYDKDLLLMTHFITKNITDNHGKNKTTVHGYFSSIFHGGVDSLVDLMNKSFPELGIKKEDCKELSWIDTTIFYSGVVNFNTANFKKEILLDRSAGKKTAFSIKLDYVKKPIPETAMVKILEKLYEEDVGAGMYVLYPYGGIMDEISESAIPFPHRAGIMYELWYTASWEKQEDNEKHINWVRSVYNFTTPYVSKNPRLAYLNYRDLDLGKNNEESPNNYTQARIWGEKYFGKNFNRLVKVKTKVDPNNFFRNEQSIPPLPPHHH

SEQ ID NO: 900 - protein, 517 aa, Artificial Sequence
  Synthetic
NPQENFLKCFSKHIPNNVANPKLIYTQNDQLYSSILNSTIQNLRFTSDTTPKPLVIVTPSNVSHIQATILCSKKVGLQIRTRSGGHDAEGMSYISQVPFVVVDLRNMHSIKIDVHSQTAWVEAGATLGEVYYWINEKNENLSFPGGYCPTVGVGGHFSGGGYGALMRNYGLAADNIIDAHLVNVDGKVLDRKSMGEDLFWAIRGGGGENFGIIAAWKIKLVPVPSKVTIFSVKKNMEIHGLVKLFNKWQNIAYKYDKDLVLMTHFITKNITDNHGKNKTTVHGYFSSIFHGGVDSLVDLMNKSFPELGIKKTDCKELSWIDTTIFYSGVVNFNTANFKKEILLDRSAGKKTAFSIKLDYVKKPIPETAMVKILEKLYEEDVGAGMYVLYPYGGIMEEISESAIPFPHRAGIMYELWYTASWEKQEDNEKHINWVRSVYNFTTPYVSKNPRLAYLNYRDLDLGKNNEESPNNYTQARIWGEKYFGKNFNRLVKVKTKVDPNNFFRNEQSIPPLPPHHH

SEQ ID NO: 901 - protein, 517 aa, Artificial Sequence
  Synthetic
NPRENFLKCFSKHIPNNVTNPKLVYTQNDSLYSSILNSTIQNLRFTSDTTPKPLVIVTPSNVSHIQATILCSKKVGLQIRTRSGGHDAEGMSYISQVPFVVVDLRNMHSIKIDVESQTAWVEAGATLGEVYYWINEKNENLSFPGGYCPTVGVGGHFSGGGYGALMRNYGLAADNIIDAHLVNVDGKVLDRKSMGEDLFWAIRGGGGENFGIIAAWKIKLVDVPSKVTIFSVKKNMEIHGLVKLFNKWQNIAYKYDKDLLLMTHFITKNITDNHGKNKTTVHGYFSSIFHGGVDSLVDLMNKSFPELGIKKTDCKELSWIDTTIFYSGVVNFNTANFKKEILLDRSAGKKTAFSIKLDYVKKPIPETAMVKILEKLYEEDVGAGMYVLYPYGGIMEEISESAIPFPHRAGIMYELWYTASWEKQEDNEKHINWVRSVYNFTTPYVSKNPRLAYLNYRDLDLGKNNEESPNNYTQARIWGEKYFGKNFNRLVKVKTKVDPNNFFRNEQSIPPLPPHHH

SEQ ID NO: 902 - protein, 517 aa, Artificial Sequence
  Synthetic
NPQENFLKCFSKHIPNNVANPKLIYTQNDSLYSSILNSTIQNLRFTSDTTPKPLVIVTPSNVSHIQATILCSKKVGLQIRTRSGGHDAEGMSYISQVPFVVVDLRNMHSIKIDVESQTAWVEAGATLGEVYYWINEKNENLSFPGGYCPTVGVGGHFSGGGYGALMRNYGLAADNIIDAHLVNVDGKVLDRKSMGEDLFWAIRGGGGENFGIIAAWKIKLVPVPSKVTIFSVKKNMEIHGLVKLFNKWQNIAYKYDKDLLLMTHFITKNITDNHGKNKTTVHGYFSSIFHGGVDSLVDLMNKSFPELGIKKEDCKELSWIDTTIFYSGVVNFNTANFKKEILLDRSAGKKTAFSIKLDYVKKPIPETAMVKILEKLYEEDVGAGMYVLYPYGGIMDEISESAIPFPHRAGIMYELWYTASWEKQEDNEKHINWVRSVYNFTTPYVSKNPRLAYLNYRDLDLGKNNEESPNNYTQARIWGEKYFGKNFNRLVKVKTKVDPNNFFRNEQSIPPLPPHHH

SEQ ID NO: 903 - protein, 517 aa, Artificial Sequence
  Synthetic
NPQENFLKCFSKHIPNNVANPKLVYTQNDSLYSSILNSTIQNLRFTSDTTPKPLVIVTPSNVSHIQATILCSKKVGLQIRTRSGGHDAEGMSYISQVPFVVVDLRNMHSIKIDVHSQTAWVEAGATLGEVYYWINEKNENLSFPGGYCPTVGVGGHFSGGGYGALMRNYGLAADNIIDAHLVNVDGKVLDRKSMGEDLFWAIRGGGGENFGIIAAWKIKLVPVPSKVTIFSVKKNMEIHGLVKLFNKWQNIAYKYDKDLVLMTHFITKNITDNHGKNKTTVHGYFSSIFHGGVDSLVDLMNKSFPELGIKKTDCKELSWIDTTIFYSGVVNFNTANFKKEILLDRSAGKKTAFSIKLDYVKKPIPETAMVKILEKLYEEDVGAGMYVLYPYGGIMEEISESAIPFPHRAGIMYELWYTASWEKQEDNEKHINWVRSVYNFTTPYVSKNPRLAYLNYRDLDLGKNNEESPNNYTQARIWGEKYFGKNFNRLVKVKTKVDPNNFFRNEQSIPPLPPHHH

SEQ ID NO: 904 - protein, 517 aa, Artificial Sequence
  Synthetic
NPRENFLKCFSKHIPNNVTNPKLVYTQNDSLYSSILNSTIQNLRFTSDTTPKPLVIVTPSNVSHIQATILCSKKVGLQIRTRSGGHDAEGMSYISQVPFVVVDLRNMHSIKIDVESQTAWVEAGATLGEVYYWINEKNENLSFPGGYCPTVGVGGHFSGGGYGALMRNYGLAADNIIDAHLVNVDGKVLDRKSMGEDLFWAIRGGGGENFGIIAAWKIKLVDVPSKVTIFSVKKNMEIHGLVKLFNKWQNIAYKYDKDLVLMTHFITKNITDNHGKNKTTVHGYFSSIFHGGVDSLVDLMNKSFPELGIKKEDCKELSWIDTTIFYSGVVNFNTANFKKEILLDRSAGKKTAFSIKLDYVKKPIPETAMVKILEKLYEEDVGAGMYVLYPYGGIMEEISESAIPFPHRAGIMYELWYTASWEKQEDNEKHINWVRSVYNFTTPYVSKNPRLAYLNYRDLDLGKNNEESPNNYTQARIWGEKYFGKNFNRLVKVKTKVDPNNFFRNEQSIPPLPPHHH

SEQ ID NO: 905 - protein, 517 aa, Artificial Sequence
  Synthetic
NPRENFLKCFSKHIPNNVANPKLVYTQNDSLYSSILNSTIQNLRFISDTTPKPLVIVTPSNVSHIQATILCSKKVGLQIRTRSGGHDAEGMSYISQVPFVVVDLRNMHSIKIDVHSQTAWVEAGATLGEVYYWINEKNENLSFPGGYCPTVGVGGHFSGGGYGALMRNYGLAADNIIDAHLVNVDGKVLDRKSMGEDLFWAIRGGGGENFGIIAAWKIKLVDVPSKVTIFSVKKNMEIHGLVKLFNKWQNIAYKYDKDLLLMTHFITKNITDNHGKNKTTVHGYFSSIFHGGVDSLVDLMNKSFPELGIKKTDCKELSWIDTTIFYSGVVNFNTANFKKEILLDRSAGKKTAFSIKLDYVKKPIPETAMVKILEKLYEEDVGAGMYVLYPYGGIMEEISESAIPFPHRAGIMYELWYTASWEKQEDNEKHINWVRSVYNFTTPYVSKNPRLAYLNYRDLDLGKNNHESPNNYTQARIWGEKYFGKNFNRLVKVKTKVDPNNFFRNEQSIPPLPPHHH

SEQ ID NO: 906 - protein, 517 aa, Artificial Sequence
  Synthetic
NPRENFLKCFSKHIPNNVTNPKLVYTQNDSLYSSILNSTIQNLRFTSDTTPKPLVIVTPSNVSHIQATILCSKKVGLQIRTRSGGHDAEGMSYISQVPFVVVDLRNMHSIKIDVESQTAWVEAGATLGEVYYWINEKNENLSFPGGYCPTVGVGGHFSGGGYGALMRNYGLAADNIIDAHLVNVDGKVLDRKSMGEDLFWAIRGGGGENFGIIAAWKIKLVDVPSKVTIFSVKKNMEIHGLVKLFNKWQNIAYKYDKDLVLMTHFITKNITDNHGKNKTTVHGYFSSIFHGGVDSLVDLMNKSFPELGIKKTDCKELSWIDTTIFYSGVVNFNTANFKKEILLDRSAGKKTAFSIKLDYVKKPIPETAMVKILEKLYEEDVGAGMYVLYPYGGIMEEISESAIPFPHRAGIMYELWYTASWEKQEDNEKHINWVRSVYNFTTPYVSKNPRLAYLNYRDLDLGKNNEESPNNYTQARIWGEKYFGKNFNRLVKVKTKVDPNNFFRNEQSIPPLPPHHH

SEQ ID NO: 907 - protein, 517 aa, Artificial Sequence
  Synthetic
NPRENFLKCFSKHIPNNVANPKLVYTQNDSLYSSILNSTIQNLRFTSDTTPKPLVIVTPSNVSHIQATILCSKKVGLQIRTRSGGHDAEGMSYISQVPFVVVDLRNMHSIKIDVESQTAWVEAGATLGEVYYWINEKNENLSFPGGYCPTVGVGGHFSGGGYGALMRNYGLAADNIIDAHLVNVDGKVLDRKSMGEDLFWAIRGGGGENFGIIAAWKIKLVDVPSKVTIFSVKKNMEIHGLVKLFNKWQNIAYKYDKDLLLMTHFITKNITDNHGKNKTTVHGYFSSIFHGGVDSLVDLMNKSFPELGIKKEDCKELSWIDTTIFYSGVVNFNTANFKKEILLDRSAGKKTAFSIKLDYVKKPIPETAMVKILEKLYEEDVGAGMYVLYPYGGIMDEISESAIPFPHRAGIMYELWYTASWEKQEDNEKHINWVRSVYNFTTPYVSKNPRLAYLNYRDLDLGKNNHESPNNYTQARIWGEKYFGKNFNRLVKVKTKVDPNNFFRNEQSIPPLPPHHH

SEQ ID NO: 908 - protein, 517 aa, Artificial Sequence
  Synthetic
NPRENFLKCFSKHIPNNVANPKLVYTQNDSLYSSILNSTIQNLRFISDTTPKPLVIVTPSNVSHIQATILCSKKVGLQIRTRSGGHDAEGMSYISQVPFVVVDLRNMHSIKIDVHSQTAWVEAGATLGEVYYWINEKNENLSFPGGYCPTVGVGGHFSGGGYGALMRNYGLAADNIIDAHLVNVDGKVLDRKSMGEDLFWAIRGGGGENFGIIAAWKIKLVDVPSKVTIFSVKKNMEIHGLVKLFNKWQNIAYKYDKDLVLMTHFITKNITDNHGKNKTTVHGYFSSIFHGGVDSLVDLMNKSFPELGIKKEDCKELSWIDTTIFYSGVVNFNTANFKKEILLDRSAGKKTAFSIKLDYVKKPIPETAMVKILEKLYEEDVGAGMYVLYPYGGIMEEISESAIPFPHRAGIMYELWYTASWEKQEDNEKHINWVRSVYNFTTPYVSKNPRLAYLNYRDLDLGKNNEESPNNYTQARIWGEKYFGKNFNRLVKVKTKVDPNNFFRNEQSIPPLPPHHH

SEQ ID NO: 909 - protein, 517 aa, Artificial Sequence
  Synthetic
NPQENFLKCFSKHIPNNVANAKLVYTQNDSLYSSILNSTIQNLRFTSDTTPKPLVIVTPSNVSHIQATILCSKKVGLQIRTRSGGHDAEGMSYISQVPFVVVDLRNMHSIKIDVHSQTAWVEAGATLGEVYYWINEKNENLSFPGGYCPTVGVGGHFSGGGYGALMRNYGLAADNIIDAHLVNVDGKVLDRKSMGEDLFWAIRGGGGENFGIIAAWKIKLVPVPSKVTIFSVKKNMEIHGLVKLFNKWQNIAYKYDKDLVLMTHFITKNITDNHGKNKTTVHGYFSSIFHGGVDSLVDLMNKSFPELGIKKEDCKELSWIDTTIFYSGVVNFNTANFKKEILLDRSAGKKTAFSIKLDYVKKPIPETAMVKILEKLYEEDVGAGMYVLYPYGGIMDEISESAIPFPHRAGIMYELWYTASWEKQEDNEKHINWVRSVYNFTTPYVSKNPRLAYLNYRDLDLGKNNEESPNNYTQARIWGEKYFGKNFNRLVKVKTKVDPNNFFRNEQSIPPLPPHHH

SEQ ID NO: 910 - protein, 517 aa, Artificial Sequence
  Synthetic
NPQENFLKCFSKHIPNNVANPKLVYTQNDSLYMSILNSTIQNLRFTSDTTPKPLVIVTPSNVSHIQATILCSKKVGLQIRTRSGGHDAEGMSYISQVPFVVVDLRNMHSIKIDVESQTAWVEAGATLGEVYYWINEKNENLSFPGGYCPTVGVGGHFSGGGYGALMRNYGLAADNIIDAHLVNVDGKVLDRKSMGEDLFWAIRGGGGENFGIIAAWKIKLVPVPSKVTIFSVKKNMEIHGLVKLFNKWQNIAYKYDKDLVLMTHFITKNITDNHGKNKTTVHGYFSSIFHGGVDSLVDLMNKSFPELGIKKTDCKELSWIDTTIFYSGVVNFNTANFKKEILLDRSAGKKTAFSIKLDYVKKPIPETAMVKILEKLYEEDVGAGMYVLYPYGGIMEEISESAIPFPHRAGIMYELWYTASWEKQEDNEKHINWVRSVYNFTTPYVSKNPRLAYLNYRDLDLGKNNEESPNNYTQARIWGEKYFGKNFNRLVKVKTKVDPNNFFRNEQSIPPLPPHHH

SEQ ID NO: 911 - protein, 517 aa, Artificial Sequence
  Synthetic
NPQENFLKCFSKHIPNNVANPKLVYTQNDQLYMSILNSTIQNLRFTSDTTPKPLVIVTPSNVSHIQATILCSKKVGLQIRTRSGGHDAEGMSYISQVPFVVVDLRNMHSIKIDVHSQTAWVEAGATLGEVYYWINEKNENLSFPGGYCPTVGVGGHFSGGGYGALMRNYGLAADNIIDAHLVNVDGKVLDRKSMGEDLFWAIRGGGGENFGIIAAWKIKLVPVPSKVTIFSVKKNMEIHGLVKLFNKWQNIAYKYDKDLVLMTHFITKNITDNHGKNKTTVHGYFSSIFHGGVDSLVDLMNKSFPELGIKKTDCKELSWIDTTIFYSGVVNFNTANFKKEILLDRSAGKKTAFSIKLDYVKKPIPETAMVKILEKLYEEDVGAGMYVLYPYGGIMDEISESAIPFPHRAGIMYELWYTASWEKQEDNEKHINWVRSVYNFTTPYVSKNPRLAYLNYRDLDLGKNNEESPNNYTQARIWGEKYFGKNFNRLVKVKTKVDPNNFFRNEQSIPPLPPHHH

SEQ ID NO: 912 - protein, 517 aa, Artificial Sequence
  Synthetic
NPRENFLKCFSKHIPNNVANPKLVYTQNDSLYSSILNSTIQNLRFTSDTTPKPLVIVTPSNVSHIQATILCSKKVGLQIRTRSGGHDAEGMSYISQVPFVVVDLRNMHSIKIDVESQTAWVEAGATLGEVYYWINEKNENLSFPGGYCPTVGVGGHFSGGGYGALMRNYGLAADNIIDAHLVNVDGKVLDRKSMGEDLFWAIRGGGGENFGIIAAWKIKLVDVPSKVTIFSVKKNMEIHGLVKLFNKWQNIAYKYDKDLLLMTHFITKNITDNHGKNKTTVHGYFSSIFHGGVDSLVDLMNKSFPELGIKKTDCKELSWIDTTIFYSGVVNFNTANFKKEILLDRSAGKKTAFSIKLDYVKKPIPETAMVKILEKLYEEDVGAGMYVLYPYGGIMDEISESAIPFPHRAGIMYELWYTASWEKQEDNEKHINWVRSVYNFTTPYVSKNPRLAYLNYRDLDLGKNNHESPNNYTQARIWGEKYFGKNFNRLVKVKTKVDPNNFFRNEQSIPPLPPHHH

SEQ ID NO: 913 - protein, 516 aa, Artificial Sequence; identical to SEQ ID NO: 544
  Synthetic

SEQ ID NO: 914 - protein, 516 aa, Artificial Sequence
  Synthetic
NPRENFLKCFSQYIPNNATNLKLVYTQNNPLYMSVLNSTIHNLRFTSDTTPKPLVIVTPSHCSHIQATILCSKKVGLQIRTRSGGHDSEGMSYISQVPFVIVDLRNMRSIKIDVHSQTAWVEAGATLGEVYYWVNEKNENLSLAAGYCPTVCAGGHFGGGGYGPLMRNYGLAADNIIDAHLVNVHGKVLDRKSMGEDLFWALRGGGAESFGIIVAWKIRLVAVPKSTMFSVKKIMEIHELVKLVNKWQNIAYKYDKDLLLMTHFITRNITDNQGKNKTAIHTYFSSVFLGGVDSLVDLMNKSFPELGIKKEDCRELSWIDTIIFYSGVVNYDTDNFNKEILLDRSAGQNGAFKIKLDYVKKPIPESVFVQILEKLYEEDIGAGMYVLYPYGGIMDEISESAIPFPHRAGILYELWYICSWEKQEDNEKHLNWIRNIYNFMTPYVSKNPRLAYLNYRDLDIGINDPKNPNNYTQARIWGEKYFGKNFDRLVKVKTLVDPNNFFRNEQSIPPLPRHRH

SEQ ID NO: 915 - protein, 516 aa, Artificial Sequence
  Synthetic
NPRENFLKCFSQYIPNNATNLKLVYTQNNPLYMSVLNSTIHNLRFTSDTTPKPLVIVTPSHVSHIQATILCSKKHGLQIRTRSGGHDSEGMSYISQVPFVIVDLRNMRSIKIDVHSQTAWVEAGATLGEVYYWVNEKNENLSLAAGYCPTVCAGGHFGGGGYGPLMRNYGLAADNIIDAHLVNVHGKVLDRKSMGEDLFWALRGGGAESFGIIVAWKIRLVAVPKSTMFSVKKIMEIHELVKLVNKWQNIAYKYDKDLLLMTHFITRNITDNQGKNKTAIHTYFSSVFLGGVDSLVDLMNKSFPELGIKKEDCRELSWIDTIIFYSGVVNYDTDNFNKEILLDRSAGQNGAFKIKLDYVKKPIPESVFVQILEKLYEEDIGAGMYVLYPYGGIMDEISESAIPFPHRAGILYELWYICSWEKQEDNEKHLNWIRNIYNFMTPYVSKNPRLAYLNYRDLDIGINDPKNPNNYTQARIWGEKYFGKNFDRLVKVKTLVDPNNFFRNEQSIPPLPRHRH

SEQ ID NO: 916 - protein, 516 aa, Artificial Sequence
  Synthetic
NPRENFLKCFSQYIPNNATNLNLVYTQNNPLYMSVLNSTIHNLRFTSDTTPKPLVIVTPSHVSHIQATILCSKKVGLQIRTRSGGHDSEGMSYISQVPFVIVDLRNMRSIKIDVHSQTAWVEAGATLGEVYYWVNEKNENLSLAAGYCPTVCAGGHFGGGGYGPLMRNYGLAADNIIDAHLVNVNGKVLDRKSMGEDLFWALRGGGAESFGIIVAWKIRLVAVPKSTMFSVKKIMEIHELVKLVNKWQNIAYKYDKDLLLMTHFITRNITDNQGKNKTAIHTYFSSVFLGGVDSLVDLMNKSFPELGIKKEDCREMSWIDTIIFYSGVVNYDTDNFNKEILLDRSAGQNGAFKIKLDYVKKPIPESVFVQILEKLYEEDIGAGMYVLYPYGGIMDEISESAIPFPHRAGILYELWYIVSWEKQEDNEKHLNWIRNIYNFMTPYVSKNPRLAYLNYRDLDIGINDPKNPNNYTQARIWGEKYFGKNFDRLVKVKTLVDPNNFFRNEQSIPPLPRHRH

SEQ ID NO: 917 - protein, 516 aa, Artificial Sequence
  Synthetic
NPRENFLKCFSQYIPNNATNLKLVYTQNNPLYMSVLNSTIHNLRFTSDTTPKPLVIVTPSHVSHIQATILCSKKVGLQIRTRSGGHDSEGMSYISQVPFVIVDLRNMRSIKIDVHSQTAWVEAGATLGEVYYWVNEKNENLSLAAGYCPTVGAGGHFGGGGYGPLMRNYGLAADNIIDAHLVNVHGKVLDRKSMGEDLFWALRGGGAESFGIIVAWKIRLVAVPKSTMFSVKKIMEIHELVKLVNKWQNIAYKYDKDLLLMTHFITRNITDNQGKNKTAIHTYFSSVFLGGVDSLVDLMNKSFPELGIKKEDCRELSWIDTIIFYSGVVNYDTDNFNKEILLDRSAGQNGAFKIKLDYVKKPIPESVFVQILEKLYEEDIGAGMYVLYPYGGIMDEISESAIPFPHRAGILYELWYICSWEKQEDNEKHLNWIRNIYNFMTPYVSKNPRLAYLNYRDLDIGINDPKNPNNYTQARIWGEKYFGKNFDRLVKVKTLVDPNNFFRNEQSIPPLPRHRH

SEQ ID NO: 918 - protein, 516 aa, Artificial Sequence
  Synthetic
NPRENFLKCFSQYIPNNATNLKLVYTQNNPLYMSVLNSTIHNLRFTSDTTPKPLVIVTPSHVSHIQATILCSKKVGLQIRTRSGGHDSEGMSYISQVPFVIVDLRNMRSIKIDVHSQTAWVEAGATLGEVYYWVNEKNENLSLAAGYCPTVCAGGHFGGGGYGPLMRNYGLAADNIIDAHLVNVHGKVLDRKSMGEDLFWALRGGGAESFGIIVAWKIRLVAVPKSTMFSVKKIMEIHELVKLVNKWQNIAYKYDKDLLLMTHFITRNITDNQGKNKTAIHTYFSSVFLGGVDSLVDLMNKSFPELGIKKEDCRELSWIDTIIFYSGVVNYDTDNFNKEILLDRSAGQNGAFKIKLDYVKKPIPESVFVQILEKLYEEDIGAGMYVLYPYGGIMDEISESAIPFPHRAGILYELWYICSWEKQEDNEKHLNWIRNIYNYMTPYVSKNPRLAYLNYRDLDIGINDPKNPNNYTQARIWGEKYFGKNFDRLVKVKTLVDPNNFFRNEQSIPPLPRHRH

SEQ ID NO: 919 - protein, 516 aa, Artificial Sequence
  Synthetic
NPRENFLKCFSQYIPNNATNLKLVYTQNNPLYMSVLNSTIHNLRFTSDTTPKPLVIVTPSHVSHIQATILCSKKVGLQIRTRSGGHDSEGMSYISQVPFVIVDLRNMRSIKIDVHSQTAWVEAGATLGEVYYWVNEKNENLSLAAGYCPTVCAGGHFGGGGYGPLMRNYGLAADNIIDAHLVNVHGKVLDRKSMGEDLFWALRGGGAESFGIIVAWKIRLVAVPKSTMFSVKKIMEIHELVKLVNKWQNIAYKYDKDLLLMTHFITRNITDNQGKNKTAIHTYFSSVFLGGVDSLVDLMNKSFPELGIKKEDCRELSWIDTIIFYSGVVNYDTDNFNKEILLDRSAGANGAFKIKLDYVKKPIPESVFVQILEKLYEEDIGAGMYVLYPYGGIMDEISESAIPFPHRAGILYELWYICSWEKQEDNEKHLNWIRNIYNFMTPYVSKNPRLAYLNYRDLDIGINDPKNPNNYTQARIWGEKYFGKNFDRLVKVKTLVDPNNFFRNEQSIPPLPRHRH

SEQ ID NO: 920 - protein, 516 aa, Artificial Sequence
  Synthetic
NPRENFLKCFSQYIPNNATNLNLVYTQNNPLYMSVLNSTIHNLRFTSDTTPKPLVIVTPSHVSHIQATILCSKKVGLQIRTRSGGHDSEGMSYISQVPFVIVDLRNMRSIKIDVHSQTAWVEAGATLGEVYYWVNEKNENLSLAAGYCPTVCAGGHFGGGGYGPLMRNYGLAADNIIDAHLVNVNGKVLDRKSMGEDLFWAIRGGGAESFGIIVAWKIRLVAVPKSTMFSVKKIMEIHELVKLVNKWQNIAYKYDKDLLLMTHFITRNITDNQGKNKTAIHTYFSSVFLGGVDSLVDLMNKSFPELGIKKEDCREMSWIDTIIFYSGVVNYDTDNFNKEILLDRSAGQNGAFKIKLDYVKKPIPESVFVQILEKLYEEDIGAGMYVLYPYGGIMDEISESAIPFPHRAGILYELWYICSWEKQEDNEKHLNWIRNIYNFMTPYVSKNPRLAYLNYRDLDIGINDPKNPNNYTQARIWGEKYFGKNFDRLVKVKTLVDPNNFFRNEQSIPPLPRHRH

SEQ ID NO: 921 - protein, 516 aa, Artificial Sequence
  Synthetic
NPRENFLKCFSQYIPNNATNLKLVYTQNNPLYMSVLNSTIHNLRFTSDTTPKPLVIVTPSHVSHIQATILCSKKVGLQIRTRSGGHDSEGMSYISQVPFVIVDLRNMRSIKIDVHSQTAWVEAGATLGEVYYWVNEKNENLSLAAGYCPTVCAGGHFGGGGYGPLMRNYGLAADNIIDAHLVNVHGKVLDRKSMGEDLFWALRGGGAESFGIIVAWKIRLVAVPKSTMFSVKKIMEIHELVKLVNKWQNIAYKYDKDLLLMTHFITRNITDNQGKNKTAIHTYFSSVFLGGVDSLVDLMNKSFPELGIKKEDCRELSWIDTIIFYSGVVNYDTDNFNKEILLDRSAGQNGAFKIKLDFVKKPIPESVFVQILEKLYEEDIGAGMYVLYPYGGIMDEISESAIPFPHRAGILYELWYICSWEKQEDNEKHLNWIRNIYNFMTPYVSKNPRLAYLNYRDLDIGINDPKNPNNYTQARIWGEKYFGKNFDRLVKVKTLVDPNNFFRNEQSIPPLPRHRH

SEQ ID NO: 922 - protein, 516 aa, Artificial Sequence
  Synthetic
NPRENFLKCFSQYIPNNATNLNLVYTQNNPLYMSVLNSTIHNLRFTSDTTPKPLVIVTPSHVSHIQATILCAKKVGLQIRTRSGGHDSEGMSYISQVPFVIVDLRNMRSIKIDVHSQTAWVEAGATLGEVYYWVNEKNENLSLAAGYCPTVCAGGHFGGGGYGPLMRNYGLAADNIIDAHLVNVNGKVLDRKSMGEDLFWALRGGGAESFGIIVAWKIRLVAVPKSTMFSVKKIMEIHELVKLVNKWQNIAYKYDKDLLLMTHFITRNITDNQGKNKTAIHTYFSSVFLGGVDSLVDLMNKSFPELGIKKEDCREMSWIDTIIFYSGVVNYDTDNFNKEILLDRSAGQNGAFKIKLDYVKKPIPESVFVQILEKLYEEDIGAGMYVLYPYGGIMDEISESAIPFPHRAGILYELWYICSWEKQEDNEKHLNWIRNIYNFMTPYVSKNPRLAYLNYRDLDIGINNPKNPNNYTQARIWGEKYFGKNFDRLVKVKTLVDPDNFFRNEQSIPPLPRHRH

SEQ ID NO: 923 - protein, 516 aa, Artificial Sequence
  Synthetic
NPRENFLKCFSQYIPNNATNLKLVYTQNNPLYMSVLNSTIHNLRFTSDTTPKPLVIVTPSHVSHIQATILCSKKVGLQIRTRSGGHDSEGMSYISQVPFVIVDLRNMRSIKIDVHSQTAWVEAGATLGEVYYWVNEKNENLSLAAGYCPTVCAGGHFGGGGYGPLMRNYGLAADNIIDAHLVNVHGKVLDRKSMGEDLFWALRGGGAESFGIIVAWKIRLVAVPKSTMFSVKKIMEIHELVKLVNKWQNIAYKYDKDLLLMTHFITRNITDNQGKNKTAIHTYFSSVFLGGVDSLVDLMNKSFPELGIKKEDCRELSWIDTIIFYSGVVNYDTDNFNKEILLDRSAGQNGAFKIKLDYVKKPIPESVFVQILEKLYEEDIGAGMYVLIPYGGIMDEISESAIPFPHRAGILYELWYICSWEKQEDNEKHLNWIRNIYNFMTPYVSKNPRLAYLNYRDLDIGINDPKNPNNYTQARIWGEKYFGKNFDRLVKVKTLVDPNNFFRNEQSIPPLPRHRH

SEQ ID NO: 924 - protein, 516 aa, Artificial Sequence
  Synthetic
NPRENFLKCFSQYIPNNATNLNLVYTQNNPLYMSVLNSTIHNLRFTSDTTPKPLVIVTPSHVSHIQATILCSKKVGLQIRTRSGGHDSEGMSYISQVPFVIVDLRNMRSIKIDVHSQTAWVEAGATLGEVYYWVNEKNENLSLAAGYCPTVCAGGHFGGGGYGPLMRNYGLAADNIIDAHLVNVNGKVLDRKSMGEDLFWALRGGGAESFGIIVAWKIRLVAVPKSTMFSVKKIMEIHELVKLVNKWQNIAYKYDKDLLLMTHFITRNITDNQGKNKTAIHTYFSSVFLGGVDSLVDLMNKSFPELGIKKEDCREMSWIDTIIFYSGVVNYDTDNFNKEILLDRSAGQNGAFKIKLDYVKKPIPESVFVQILEKLYEEDIGAGMYVLYPYGGIMDEISESAIPFPHRAGILYEIWYICSWEKQEDNEKHLNWIRNIYNFMTPYVSKNPRLAYLNYRDLDIGINDPKNPNNYTQARIWGEKYFGKNFDRLVKVKTLVDPNNFFRNEQSIPPLPRHRH

SEQ ID NO: 925 - protein, 516 aa, Artificial Sequence
  Synthetic
NPRENFLKCFSQYIPNNATNLKLVYTQNNPLYMSVLNSTIHNLRFTSDTTPKPLVIVTPSHVSHIQATILCSKKVGLQIRTRSGGHDSEGMSYISQVPFVIVDLRNMRSIKIDVHSQTAWVEAGATLGEVYYWINEKNENLSLAAGYCPTVCAGGHFGGGGYGPLMRNYGLAADNIIDAHLVNVHGKVLDRKSMGEDLFWALRGGGAESFGIIVAWKIRLVAVPKSTMFSVKKIMEIHELVKLVNKWQNIAYKYDKDLLLMTHFITRNITDNQGKNKTAIHTYFSSVFLGGVDSLVDLMNKSFPELGIKKEDCRELSWIDTIIFYSGVVNYDTDNFNKEILLDRSAGQNGAFKIKLDYVKKPIPESVFVQILEKLYEEDIGAGMYVLYPYGGIMDEISESAIPFPHRAGILYELWYICSWEKQEDNEKHLNWIRNIYNFMTPYVSKNPRLAYLNYRDLDIGINDPKNPNNYTQARIWGEKYFGKNFDRLVKVKTLVDPNNFFRNEQSIPPLPRHRH

SEQ ID NO: 926 - protein, 516 aa, Artificial Sequence
  Synthetic
NPRENFLKCFSQYIPNNATNLNLVYTQNNPLYMSVLNSTIHNLRFTSDTTPKPLVIVTPSHVSHIQATILCSKKVGLQIRTRSGGHDSEGMSYISQVPFVIVDLRNMRSIKIDVHSQTAWVEAGATLGEVYYWVNEKNENLSFAAGYCPTVCAGGHFGGGGYGPLMRNYGLAADNIIDAHLVNVNGKVLDRKSMGEDLFWALRGGGAESFGIIVAWKIRLVAVPKSTMFSVKKIMEIHELVKLVNKWQNIAYKYDKDLLLMTHFITRNITDNQGKNKTAIHTYFSSVFLGGVDSLVDLMNKSFPELGIKKEDCREMSWIDTIIFYSGVVNYDTDNFNKEILLDRSAGQNGAFKIKLDYVKKPIPESVFVQILEKLYEEDIGAGMYVLYPYGGIMDEISESAIPFPHRAGILYELWYICSWEKQEDNEKHLNWIRNIYNFMTPYVSKNPRLAYLNYRDLDIGINDPKNPNNYTQARIWGEKYFGKNFDRLVKVKTLVDPNNFFRNEQSIPPLPRHRH

SEQ ID NO: 927 - protein, 516 aa, Artificial Sequence
  Synthetic
NPRENFLKCFSQYIPNNATNLKLVYTQNNPLYMSVLNSTIHNLRFTSDTTPKPLVIVTPSHVSHIQATILCSKKVGLQIRTRSGGHDSEGMSYISQVPFVIVDLRNMRSIKIDVHSQTAWVEAGATLGEVYYWVNEKNENLSLAAGYCPTVCAGGHFGGGGYGPLMRNYGLAADNIIDAHLVNVHGKVLDRKSMGEDLFWALRGGGAESFGIIVAWKIRLVAVPKSTMFSVKKIMEIHELVKLVNKWQNIAYKYDKDLLLMTHFITRNITDNQGKNKTAIHTYFSSVFLGGVDSLVDLMNKSFPELGIKKEDCRELSWIDTIIFYSGVVNYDTDNFNKEILLDRSAGNNGAFKIKLDYVKKPIPESVFVQILEKLYEEDIGAGMYVLYPYGGIMDEISESAIPFPHRAGILYELWYICSWEKQEDNEKHLNWIRNIYNFMTPYVSKNPRLAYLNYRDLDIGINDPKNPNNYTQARIWGEKYFGKNFDRLVKVKTLVDPNNFFRNEQSIPPLPRHRH

SEQ ID NO: 928 - protein, 516 aa, Artificial Sequence
  Synthetic
NPRENFLKCFSQYIPNNATNLKLVYTQNNPLYMSVLNSTIHNLRFTSDTTPKPLVIVTPSHVSHIQATILCSKKVGLQIRTRSGGHDSEGMSYISMVPFVIVDLRNMRSIKIDVHSQTAWVEAGATLGEVYYWVNEKNENLSLAAGYCPTVCAGGHFGGGGYGPLMRNYGLAADNIIDAHLVNVHGKVLDRKSMGEDLFWALRGGGAESFGIIVAWKIRLVAVPKSTMFSVKKIMEIHELVKLVNKWQNIAYKYDKDLLLMTHFITRNITDNQGKNKTAIHTYFSSVFLGGVDSLVDLMNKSFPELGIKKEDCRELSWIDTIIFYSGVVNYDTDNFNKEILLDRSAGQNGAFKIKLDYVKKPIPESVFVQILEKLYEEDIGAGMYVLYPYGGIMDEISESAIPFPHRAGILYELWYICSWEKQEDNEKHLNWIRNIYNFMTPYVSKNPRLAYLNYRDLDIGINDPKNPNNYTQARIWGEKYFGKNFDRLVKVKTLVDPNNFFRNEQSIPPLPRHRH

SEQ ID NO: 929 - protein, 516 aa, Artificial Sequence
  Synthetic
NPRENFLKCFSQYIPNNATNLNLVYTQNNPLYMSVLNSTIHNLRFTSDTTPKPLVIVTPSHVSHIQATILCSKKVGLQIRTRSGGHDSEGMSYISQVPFVIVDLRNMRSIKIDVHSQTAWVEAGATLGEVYYWVNEKNENLSLAAGYCPTVCAGGHFGGGGYGPLMRNYGLAADNIIDAHLVNVNGKVLDRKSMGEDLFWALRGGGAESFGIIVAWKIRLVAVPKSTMFSVKKIMEIHELVKLVNKWQNIAYKYDKDLLLMTHMITRNITDNQGKNKTAIHTYFSSVFLGGVDSLVDLMNKSFPELGIKKEDCREMSWIDTIIFYSGVVNYDTDNFNKEILLDRSAGQNGAFKIKLDYVKKPIPESVFVQILEKLYEEDIGAGMYVLYPYGGIMDEISESAIPFPHRAGILYELWYICSWEKQEDNEKHLNWIRNIYNFMTPYVSKNPRLAYLNYRDLDIGINDPKNPNNYTQARIWGEKYFGKNFDRLVKVKTLVDPNNFFRNEQSIPPLPRHRH

SEQ ID NO: 930 - protein, 516 aa, Artificial Sequence
  Synthetic
NPRENFLKCFSQYIPNNATNLNLVYTQNNPLYMSVLNSTIHNLRFTSDTTPKPLVIVTPSHVSHIQATILCSKKVGLQIRTRSGGHDSEGMSYISQVPFVIVDLRNMRSIKIDVHSQTAWVEAGATLGEVYYWVNEKNENLSLAAGYCPTVCAGGHFGGGGYGPLMRNYGLAADNIIDAHLVNVNGKVLDRKSMGEDLFWALRGGGAESFGIIVAWKIRLVAVPKSTMFSVKKIMEIHELVKLVNKWQNIAYKYDKDLLLMTHFITRNITDNQGKNKTAIHTYFSSVFLGGVDSLVDLMNKSFPELGIKKEDCRELSWIDTIIFYSGVVNYDTDNFNKEILLDRSAGQNGAFKIKLDYVKKPIPESVFVQILEKLYEEDIGAGMYVLYPYGGIMDEISESAIPFPHRAGILYELWYICSWEKQEDNEKHLNWIRNIYNFMTPYVSKNPRLAYLNYRDLDIGINDPKNPNNYTQARIWGEKYFGKNFDRLVKVKTLVDPNNFFRNEQSIPPLPRHRH

SEQ ID NO: 931 - protein, 516 aa, Artificial Sequence
  Synthetic
NPRENFLKCFSQYIPNNATNLNLVYTQNNPLYMSVLNSTIHNLRFTSDTTPKPLVIVTPSHVSHIQATILCSKKVGLQIRTRSGGHDSEGMSYISQVPFVIVDLRNMRSIKIDVHSQTAWVEAGATLGEVYYWVNEKNENLSLAAGYCPTVCAGGHFGGGGYGPLMRNYGLAADNIIDAHLVNVNGKVLDRKSMGEDLFWALRGGGAESFGIIVAWKIRLVAVPKSTMFSVKKIMEIHELVKLVNKWQNIAYKYDKDLLLMTHFITRNITDNQGKNKTAIHTYFSSVFLGGVDSLVDLMNKSFPELGIKKEDCREMSWIDTIIFYSGVVNYDTDNFNKEILLDRSAGQNGAFKIKLDYVKKPIPESVFVQILEKLYEEDIGAGMYVLYPYGGIMDEISESAIPFPHRAGILYELWYICSWEKQEDNEKHLNWIRNIYNFMTPYVSKNPRLAYINYRDLDIGINDPKNPNNYTQARIWGEKYFGKNFDRLVKVKTLVDPNNFFRNEQSIPPLPRHRH

SEQ ID NO: 932 - protein, 516 aa, Artificial Sequence
  Synthetic
NPRENFLKCFSQYIPNNATNLKLVYTQNNPLYMSVLNSTIHNLRFTSDTTGKPLVIVTPSHVSHIQATILCSKKVGLQIRTRSGGHDSEGMSYISQVPFVIVDLRNMRSIKIDVHSQTAWVEAGATLGEVYYWVNEKNENLSLAAGYCPTVCAGGHFGGGGYGPLMRNYGLAADNIIDAHLVNVHGKVLDRKSMGEDLFWALRGGGAESFGIIVAWKIRLVAVPKSTMFSVKKIMEIHELVKLVNKWQNIAYKYDKDLLLMTHFITRNITDNQGKNKTAIHTYFSSVFLGGVDSLVDLMNKSFPELGIKKEDCRELSWIDTIIFYSGVVNYDTDNFNKEILLDRSAGQNGAFKIKLDYVKKPIPESVFVQILEKLYEEDIGAGMYVLYPYGGIMDEISESAIPFPHRAGILYELWYICSWEKQEDNEKHLNWIRNIYNFMTPYVSKNPRLAYLNYRDLDIGINDPKNPNNYTQARIWGEKYFGKNFDRLVKVKTLVDPNNFFRNEQSIPPLPRHRH

SEQ ID NO: 933 - protein, 516 aa, Artificial Sequence
  Synthetic
NPRENFLKCFSQYIPNNATNLNLVYTQNNPLYMSVLNSTIHNLRFTSDTTPKPLVIVTPSHVSHIQATILCSKKVGLQIRTRSGGHDSEGMSYISQVPFVIVDLRNMRSIKIDVHSQTAWVEAGATLGEVYYWVNEKNENLSLAAGYCPTVCAGGHFGGGGYGPLMRNYGLAADNIIDAHLVNVNGKVLDRKSMGEDLFWALRGGGAESFGIIVAWKIRLVAVPKSTMFSVKKIMEIHELVKLVNKWQNIAYKYDKDLLLMTHFITRNITDNQGKNKTAIHTYFSSVFLGGVDSLVDLMNKSFPELGIKKEDCREMSWIDTIIFYSGVVNYDTDNFNKEILLDRSAGQNGAFKIKLDFVKKPIPESVFVQILEKLYEEDIGAGMYVLYPYGGIMDEISESAIPFPHRAGILYELWYICSWEKQEDNEKHLNWIRNIYNFMTPYVSKNPRLAYLNYRDLDIGINDPKNPNNYTQARIWGEKYFGKNFDRLVKVKTLVDPNNFFRNEQSIPPLPRHRH

SEQ ID NO: 934 - protein, 516 aa, Artificial Sequence
  Synthetic
NPRENFLKCFSQYIPNNATNLNLVYTQNNPLYMSVLNSTIHNLRFTSDTTPKPLVIVTPSHVSHIQATILCSKKVGLQIRTRSGGHDSEGMSYISQVPFVIVDLRNMRSIKIDVHSQTAWVEAGATLGEVYYWVNEKNENLSLAAGYCPTVCAGGHFGGGGYGPLMRNYGLAADNIIDAHLVNVNGKVLDRKSMGEDLFWALRGGGAESFGIIVAWKIRLVAVPKSTMFSVKKIMEIHELVKLVNKWQNIAYKYDKDLLLMTHFITRNITDNQGKNKTAIHTYFSSVFLGGVDSLVDLMNKSFPELGIKKEDCREMSWIDTIIFYSGVVNYDTDNFNKEILLDRSAGQFGAFKIKLDYVKKPIPESVFVQILEKLYEEDIGAGMYVLYPYGGIMDEISESAIPFPHRAGILYELWYICSWEKQEDNEKHLNWIRNIYNFMTPYVSKNPRLAYLNYRDLDIGINDPKNPNNYTQARIWGEKYFGKNFDRLVKVKTLVDPNNFFRNEQSIPPLPRHRH

SEQ ID NO: 935 - protein, 516 aa, Artificial Sequence
  Synthetic
NPRENFLKCFSQYIPNNATNLNLVYTQNNPLYMSVLNSTIHNLRFTSDTTPKPLVIVTPSHVSHIQATILCSKKVGLQIRTRSGGHDSEGMSYISQVPFVIVDLRNMRSIKIDVHSQTAWVEAGATLGEVYYWVNEKNENLSLAAGYCPTVCAGGHFGGGGYGPLMRNYGLAADNIIDAHLVNVNGKVLDRKSMGEDLFWALRGGGAESFGIIVAWKIRLVAVPKSTMFSVKKIMEIHELVKLVNKWQNIAYKYDKDLLLMTHFITRNITDNQGKNKTAIHTYFSSVFLGGVDSLVDLMNKSFPELGIKKEDCREMSWIDTIIFYSGVVNYDTDNFNKEILLDRSAGQNGAFKIKLDYVKKPIPESVFVQILEKLYEEDIGAGMYVLYPYGGIMDEISESAIPFPHRAGILYELWYICSWEKQEDNEKHLNWIRNIYNFMTPYVSKNPRLAYLNYRDLDIGINDPKNPNNYTQARQWGEKYFGKNFDRLVKVKTLVDPNNFFRNEQSIPPLPRHRH

SEQ ID NO: 936 - protein, 516 aa, Artificial Sequence
  Synthetic
NPRENFLKCFSQYIPNNATNLNLVYTQNNPLYMSVLNSTIHNLRFTSDTTPKPLVIVTPSHVSHIQATILCSKKVGLQIRTRSGGHDSEGMSYISQVPFVIVDLRNMRSIKIDVHSQTAWVEAGATLGEVYYWVNEKNENLSLAAGYCPTVCAGGHFGGGGYGPLMRNYGLAADNIIDAHLVNVNGKVLDRKSMGEDLFWALRGGGAESFGIIVAWKIRLVAVPKSTMFSVKKIMEIHELVKLVNKWQNIAYKYDKDLLLMTHFITRNITDNQGKNKTAIHTYFSSVFLGGVDSLVDLMNKSFPELGIKKEDCREMSWIDTIIFYSGVVNYDTDNFNKEILLDRSAGQNGAFKIKLDYVKKPIPESVFVQILEKLYEEDIGAGMYVLYPYGGIMDEISESAIPFPHRAGILYELWYICSWEKQEDNEKHLNWIRNIYNFMTPYVSKNPRLAYLNYRDVDIGINDPKNPNNYTQARIWGEKYFGKNFDRLVKVKTLVDPNNFFRNEQSIPPLPRHRH

SEQ ID NO: 937 - protein, 516 aa, Artificial Sequence
  Synthetic
NPRENFLKCFSQYIPNNATNLNLVYTQNNPLYMSVLNSTIHNLRFTSDTTPKPLVIVTPSHVSHIQATILCSKKVGLQIRTRSGGHDSEGMSYISQVPFVIVDLRNMRSIKIDVHSQTAWVEAGATLGEVYYWVNEKNENLSLAAGYCPTVCAGGHFGGGGYGPLMRNYGLAADNIIDAHLVNVNGKVLDRKSMGEDLFWALRGGGAESFGIIVAWKIRLVAVPKSTMFSVKKIMEIHELVKLVNKWQNIAYKYDKDLLLMTHFITRNITDNQGKNKTAIHTYFSSVFLGGVDSLVDLMNKSFPELGIKKEDCREMSWIDTIIFYSGVVNYDTDNFNKEILLDRSAGQRGAFKIKLDYVKKPIPESVFVQILEKLYEEDIGAGMYVLYPYGGIMDEISESAIPFPHRAGILYELWYICSWEKQEDNEKHLNWIRNIYNFMTPYVSKNPRLAYLNYRDLDIGINDPKNPNNYTQARIWGEKYFGKNFDRLVKVKTLVDPNNFFRNEQSIPPLPRHRH

SEQ ID NO: 938 - protein, 516 aa, Artificial Sequence
  Synthetic
NPRENFLKCFSQYIPNNATNLNLVYTQNNPLYMSVLNSTIHNLRFTSDTTPKPLVIVTPSHVSHIQATILCSKKVGLQIRTRSGGHDSEGMSYISQVPFVIVDLRNMRSIKIDVHSQTAWVEAGATLGEVYYWVNEKNENLSLAAGYCPTVCAGGFFGGGGYGPLMRNYGLAADNIIDAHLVNVNGKVLDRKSMGEDLFWALRGGGAESFGIIVAWKIRLVAVPKSTMFSVKKIMEIHELVKLVNKWQNIAYKYDKDLLLMTHFITRNITDNQGKNKTAIHTYFSSVFLGGVDSLVDLMNKSFPELGIKKEDCREMSWIDTIIFYSGVVNYDTDNFNKEILLDRSAGQNGAFKIKLDYVKKPIPESVFVQILEKLYEEDIGAGMYVLYPYGGIMDEISESAIPFPHRAGILYELWYICSWEKQEDNEKHLNWIRNIYNFMTPYVSKNPRLAYLNYRDLDIGINDPKNPNNYTQARIWGEKYFGKNFDRLVKVKTLVDPNNFFRNEQSIPPLPRHRH

SEQ ID NO: 939 - protein, 516 aa, Artificial Sequence
  Synthetic
NPRENFLKCFSQYIPNNATNLKLVYTQNNPLYMSVLNSTIHNLRFTSDTTPKPLVIVTPSHVSHIQGTILCSKKVGLQIRTRSGGHDSEGMSYISQVPFVIVDLRNMRSIKIDVHSQTAWVEAGATLGEVYYWVNEKNENLSLAAGYCPTVCAGGHFGGGGYGPLMRNYGLAADNIIDAHLVNVHGKVLDRKSMGEDLFWAIRGGGAESFGIIVAWKIRLVAVPKSTMFSVKKIMEIHELVKLVNKWQNIAYKYDKDLLLMTHFITRNITDNQGKNKTAIHTYFSSVFLGGVDSLVDLMNKSFPELGIKKEDCRELSWIDTIIFYSGVVNYDTDNFNKEILLDRSAGQNGAFKIKLDYVKKPIPESVFVQILEKLYEEDIGAGMYALYPYGGIMDEISESAIPFPHRAGILYELWYICSWEKQEDNEKHLNWIRNIYNFMTPYVSKNPRLAYLNYRDLDIGINDPKNPNNYTQARIWGEKYFGKNFDRLVKVKTLVDPNNFFRNEQSIPPLPRHRH

SEQ ID NO: 940 - protein, 516 aa, Artificial Sequence
  Synthetic
NPRENFLKCFSQYIPNNATNLKLVYTQNNPLYMSVLNSTIHNLRFTSDTTPKPLVIVTPSHVSHIQATILCSKKVGLQIRTRSGGHDSEGMSYISQVPFVIVDLRNMRSIKIDVHSQTAWVEAGATLGEVYYWVNEKNENLSLAAGYCPTVCAGGHFGGGGYGPLMRNYGLAADNIIDAHLVNVHGKVLDRKSMGEDLFWALRGGGAESFGIIVAWKIRLVAVPKSTMFSVKKIMEIHELVKLVNKWQNIAYKYDKDLLLMTHFITRNITDNQGKNKTAIHTYFSSVFLGGVDSLVDLMNKSFPELGIKKEDCRELSWIDTIIFYSGVVNYDTDNFNKEILLDRSAGQNGAFKIKLDYVKKPIPESVFVQILEKLYEEDIGAGMYALYPYGGIMDEISESAIPFPHRAGILYELWYICSWEKQEDNEKHLNWIRNIYNFMTPYVSKNPRLAYLNYRDLDIGINDPKNPNNYTQARIWGEKYFGKNFDRLVKVKTLVDPNNFFRNEQSIPPLPRHRH

SEQ ID NO: 941 - protein, 516 aa, Artificial Sequence
  Synthetic
NPRENFLKCFSQYIPNNATNLNLVYTQNNPLYMSVLNSTIHNLRFTSDTTPKPLVIVTPSHVSHIQGTILCSKKVGLQIRTRSGGHDSEGMSYISQVPFVIVDLRNMRSIKIDVHSQTAWVEAGATLGEVYYWVNEKNENLSLAAGYCPTVCAGGHFGGGGYGPLMRNYGLAADNIIDAHLVNVHGKVLDRKSMGEDLFWALRGGGAESFGIIVAWKIRLVAVPKSTMFSVKKIMEIHELVKLVNKWQNIAYKYDKDLLLMTHFITRNITDNQGKNKTAIHTYFSSVFLGGVDSLVDLMNKSFPELGIKKEDCREMSWIDTIIFYSGVVNYDTDNFNKEILLDRSAGQNGAFKIKLDYVKKPIPESVFVQILEKLYEEDIGAGMYALYPYGGIMDEISESAIPFPHRAGILYELWYICSWEKQEDNEKHLNWIRNIYNFMTPYVSKNPRLAYLNYRDLDIGINDPKNPNNYTQARIWGEKYFGKNFDRLVKVKTLVDPDNFFRNEQSIPPLPRHRH

SEQ ID NO: 942 - protein, 516 aa, Artificial Sequence
  Synthetic
NPRENFLKCFSQYIPNNATNLKLVYTQNNPLYMSVLNSTIHNLRFTSDTTPKPLVIVTPSHVSHIQGTILCSKKVGLQIRTRSGGHDSEGMSYISQVPFVIVDLRNMRSIKIDVHSQTAWVEAGATLGEVYYWVNEKNENLSLAAGYCPTVCAGGHFGGGGYGPLMRNYGLAADNIIDAHLVNVHGKVLDRKSMGEDLFWALRGGGAESFGIIVAWKIRLVAVPKSTMFSVKKIMEIHELVKLVNKWQNIAYKYDKDLLLMTHFITRNITDNQGKNKTAIHTYFSSVFLGGVDSLVDLMNKSFPELGIKKEDCRELSWIDTIIFYSGVVNYDTDNFNKEILLDRSAGQNGAFKIKLDYVKKPIPESVFVQILEKLYEEDIGAGMYALYPYGGIMDEISESAIPFPHRAGILYELWYICSWEKQEDNEKHLNWIRNIYNFMTPYVSKNPRLTYLNYRDLDIGINDPKNPNNYTQARIWGEKYFGKNFDRLVKVKTLVDPNNFFRNEQSIPPLPRHRH

SEQ ID NO: 943 - protein, 516 aa, Artificial Sequence
  Synthetic
NPRENFLKCFSQYIPNNATNLKLVYTQNNPLYMSVLNSTIHNLRFTSDTTPKPLVIVTPSHVSHIQGTILCSKKVGLQIRTRSGGHDAEGMSYISQVPFVIVDLRNMRSIKIDVHSQTAWVEAGATLGEVYYWVNEKNENLSLAAGYCPTVCAGGHFGGGGYGPLMRNYGLAADNIIDAHLVNVHGKVLDRKSMGEDLFWALRGGGAESFGIIVAWKIRLVAVPKSTMFSVKKIMEIHELVKLVNKWQNIAYKYDKDLLLMTHFITRNITDNQGKNKTAIHTYFSSVFLGGVDSLVDLMNKSFPELGIKKEDCRELSWIDTIIFYSGVVNYDTDNFNKEILLDRSAGQNGAFKIKLDYVKKPIPESVFVQILEKLYEEDIGAGMYALYPYGGIMDEISESAIPFPHRAGILYELWYICSWEKQEDNEKHLNWIRNIYNFMTPYVSKNPRLAYLNYRDLDIGINDPKNPNNYTQARIWGEKYFGKNFDRLVKVKTLVDPNNFFRNEQSIPPLPRHRH

SEQ ID NO: 944 - protein, 516 aa, Artificial Sequence
  Synthetic
NPRENFLKCFSQYIPNNATNLNLVYTQNNPLYMSVLNSTIHNLRFTSDTTPKPLVIVTPSHVSHIQGTILCSKKVGLQIRTRSGGHDAEGMSYISQVPFVIVDLRNMRSIKIDVHSQTAWVEAGATLGEVYYWVNEKNENLSLAAGYCPTVCAGGHFGGGGYGPLMRNYGLAADNIIDAHLVNVHGKVLDRKSMGEDLFWALRGGGAESFGIIVAWKIRLVAVPKSTMFSVKKIMEIHELVKLVNKWQNIAYKYDKDLLLMTHFITRNITDNQGKNKTAIHTYFSSVFLGGVDSLVDLMNKSFPELGIKKEDCREMSWIDTIIFYSGVVNYDTDNFNKEILLDRSAGQNGAFKIKLDYVKKPIPESVFVQILEKLYEEDIGAGMYALYPYGGIMDEISESAIPFPHRAGILYELWYICSWEKQEDNEKHLNWIRNIYNFMTPYVSKNPRLAYLNYRDLDIGINDPKNPNNYTQARIWGEKYFGKNFDRLVKVKTLVDPDNFFRNEQSIPPLPRHRH

SEQ ID NO: 945 - protein, 516 aa, Artificial Sequence
  Synthetic
NPRENFLKCFSQYIPNNATNLNLVYTQNNPLYMSVLNSTIHNLRFTSDTTPKPLVIVTPSHVSHIQGTILCSKKVGLQIRTRSGGHDSEGMSYISQVPFVIVDLRNMRSIKIDVHSQTAWVEAGATLGEVYYWVNEKNENLSLAAGYCPTVCAGGHFGGGGYGPLMRNYGLAADNIIDAHLVNVNGKVLDRKSMGEDLFWALRGGGAESFGIIVAWKIRLVAVPKSTMFSVKKIMEIHELVKLVNKWQNIAYKYDKDLLLMTHFITRNITDNQGKNKTAIHTYFSSVFLGGVDSLVDLMNKSFPELGIKKEDCREMSWIDTIIFYSGVVNYDTDNFNKEILLDRSAGQNGAFKIKLDYVKKPIPESVFVQILEKLYEEDIGAGMYALYPYGGIMDEISESAIPFPHRAGILYELWYICSWEKQEDNEKHLNWIRNIYNFMTPYVSKNPRLAYLNYRDLDIGINDPKNPNNYTQARIWGEKYFGKNFDRLVKVKTLVDPDNFFRNEQSIPPLPRHRH

SEQ ID NO: 946 - protein, 516 aa, Artificial Sequence
  Synthetic
NPRENFLKCFSQYIPNNATNLKLVYTQNNPLYMSVLNSTIHNLRFTSDTTPKPLVIVTPSHVSHIQGTILCSKKVGLQIRTRSGGHDSEGMSYISQVPFVIVDLRNMRSIKIDVHSQTAWVEAGATLGEVYYWVNEKNENLSLAAGYCPTVCAGGHFGGGGYGPLMRNYGLAADNIIDAHLVNVHGKLLDRKSMGEDLFWALRGGGAESFGIIVAWKIRLVAVPKSTMFSVKKIMEIHELVKLVNKWQNIAYKYDKDLLLMTHFITRNITDNQGKNKTAIHTYFSSVFLGGVDSLVDLMNKSFPELGIKKEDCRELSWIDTIIFYSGVVNYDTDNFNKEILLDRSAGQNGAFKIKLDYVKKPIPESVFVQILEKLYEEDIGAGMYALYPYGGIMDEISESAIPFPHRAGILYELWYICSWEKQEDNEKHLNWIRNIYNFMTPYVSKNPRLAYLNYRDLDIGINDPKNPNNYTQARIWGEKYFGKNFDRLVKVKTLVDPNNFFRNEQSIPPLPRHRH

SEQ ID NO: 947 - protein, 516 aa, Artificial Sequence
  Synthetic
NPRENFLKCFSQYIPNNATNLKLVYTQNNPLYMSVLNSTIHNLRFTSDTTPKPLVIVTPSHVSHIQGTILCSKKVGLQIRTRSGGHDSEGMSYISQVPFVIVDLRNMRSIKIDVHSQTAWVEAGATLGEVYYWVNEKNENLSLAAGYCPTVCAGGHFGGGGYGPLMRNYGLAADNIIDAHLVNVHGKVLDRKSMGEDLFWALRGGGAESFGIIVAWKIRLVAVPKSTMFSVKKIMEIHELVKLVNKWQNIAYKYDKDLLLMTHFITRNITDNQGKNKTAIHTYFSSVFLGGVDSLVDLMNKSFPELGIKKEDCRELSWIDTIIFYSGVVNYDTDNFNKEILLDRSAGGNGAFKIKLDYVKKPIPESVFVQILEKLYEEDIGAGMYALYPYGGIMDEISESAIPFPHRAGILYELWYICSWEKQEDNEKHLNWIRNIYNFMTPYVSKNPRLAYLNYRDLDIGINDPKNPNNYTQARIWGEKYFGKNFDRLVKVKTLVDPNNFFRNEQSIPPLPRHRH

SEQ ID NO: 948 - protein, 516 aa, Artificial Sequence
  Synthetic
NPRENFLKCFSQYIPNNATNLKLVYTQNNPLYMSVLNSTIHNLRFTSDTTPKPLVIVTPSHVSHIQGTILCAKKVGLQIRTRSGGHDSEGMSYISQVPFVIVDLRNMRSIKIDVHSQTAWVEAGATLGEVYYWVNEKNENLSLAAGYCPTVCAGGHFGGGGYGPLMRNYGLAADNIIDAHLVNVHGKVLDRKSMGEDLFWALRGGGAESFGIIVAWKIRLVAVPKSTMFSVKKIMEIHELVKLVNKWQNIAYKYDKDLLLMTHFITRNITDNQGKNKTAIHTYFSSVFLGGVDSLVDLMNKSFPELGIKKEDCRELSWIDTIIFYSGVVNYDTDNFNKEILLDRSAGQNGAFKIKLDYVKKPIPESVFVQILEKLYEEDIGAGMYALYPYGGIMDEISESAIPFPHRAGILYELWYICSWEKQEDNEKHLNWIRNIYNFMTPYVSKNPRLAYLNYRDLDIGINDPKNPNNYTQARIWGEKYFGKNFDRLVKVKTLVDPNNFFRNEQSIPPLPRHRH

SEQ ID NO: 949 - protein, 516 aa, Artificial Sequence
  Synthetic
NPRENFLKCFSQYIPNNATNLKLVYTQNNPLYMSVLNSTIHNLRFTSDTTPKPLVIVTPSHVSHIQGTILCSKKVGLQIRTRSGGHDSEGMSYISQVPFVIVDLRNMRSIKIDVHSQTAWVEAGATLGEVYYWVNEKNENLSLAAGYCPTVCAGGHFGGGGYGPLMRNYGLAADNIIDAHLVNVHGKVLDRKSMGEDLFWALRGGGAESFGIIVAWKIRLVAVPKSTMFSVKKIMEIHELVKLVNKWQNIAYKYDKDLLLMTHFITRNITDNQGKNKTAIHTYFSSVFLGGVDSLVDLMNKSFPELGIKKEDCRELSWIDTIIFYSGVVNYDTDNFNKEILLDRSAGPNGAFKIKLDYVKKPIPESVFVQILEKLYEEDIGAGMYALYPYGGIMDEISESAIPFPHRAGILYELWYICSWEKQEDNEKHLNWIRNIYNFMTPYVSKNPRLAYLNYRDLDIGINDPKNPNNYTQARIWGEKYFGKNFDRLVKVKTLVDPNNFFRNEQSIPPLPRHRH

SEQ ID NO: 950 - protein, 516 aa, Artificial Sequence
  Synthetic
NPRENFLKCFSQYIPNNATNLKLVYTQNNPLYMSVLNSTIHNLRFTSDTTPKPLVIVTPSHVSHIQGTILCSKKVGLQIRTRSGGHDSEGMSYISQVPFVIVDLRNMRSIKIDVHSQTAWVEAGATLGEVYYWVNEKNENLSLAAGYCPTVCAGGHFGGGGYGPLMRNYGLAADNIIDAHLVNVHGKVLDRKSMGEDLFWALRGGGAESFGIIVAWKIRLVAVPKSTMFSVKKIMEIHELVKLVNKWQNIAYKYDKDLLLMTHFITRNITDNQGKNKTAIHTYFSSVFLGGVDSLVDLMNKSFPELGIKKEDCRELSWIDTIIFYSGVVNYDTDNFNKEILLDRSAGQNGAFKIKLDYVKKPIPESVFVQILEKLYEEDIGAGMYALYPYGGIMDEISESAIPFPHRAGILYELWYICSWEKQTDNEKHLNWIRNIYNFMTPYVSKNPRLAYLNYRDLDIGINDPKNPNNYTQARIWGEKYFGKNFDRLVKVKTLVDPNNFFRNEQSIPPLPRHRH

SEQ ID NO: 951 - protein, 516 aa, Artificial Sequence
  Synthetic
NPRENFLKCFSQYIPNNATNLKLVYTQNNPLYMSVLNSTIHNLRFTSDTTPKPLVIVTPSHVSHIQGTILCSKKVGLQIRTRSGGHDSEGMSYISQVPFVIVDLRNMRSIKIDVHSQTAWVEAGATLGEVYYWVNEKNENLSLAAGYCPTVCAGGHFGGGGYGPLMRNYGLAADNIIDAHLVNVHGKVLDRKSMGEDLFWALRGGGAESFGIIVAWKIRLVAVPKSTMFSVKKIMEIHELVKLVNKWQNIAYKYDKDLLLMTHFITRNITDNQGKNKTAIHTYFSSVFLGGVDSLVDLMNKSFPELGIKKEDCRELSWIDTIIFYSGVVNYDTDNFNKEILLDRSAGTNGAFKIKLDYVKKPIPESVFVQILEKLYEEDIGAGMYALYPYGGIMDEISESAIPFPHRAGILYELWYICSWEKQEDNEKHLNWIRNIYNFMTPYVSKNPRLAYLNYRDLDIGINDPKNPNNYTQARIWGEKYFGKNFDRLVKVKTLVDPNNFFRNEQSIPPLPRHRH

SEQ ID NO: 952 - protein, 516 aa, Artificial Sequence
  Synthetic
NPRENFLKCFSQYIPNNATNLKLVYTQNNPLYMSVLNSTIHNLRFTSDTTPKPLVIVTPSHVSHIQGTILCSKKVGLQIRTRSGGHDSEGMSYISQVPFVIVDLRNMRSIKIDVHSQTAWVEAGATLGEVYYWVNEKNENLSLAAGYCPTVCAGGHFGGGGYGPLMRNYGLAADNIIDAHLVNVHGKVLDRKSMGEDLFWALRGGGAESFGIIVAWKIRLVAVPKSTMFSVKKIMEIHELVKLVNKWQNIAYKYDKDLLLMTHFITRNITDNQGKNKTAIHTYFSSVFLGGVDSLVDLMNKSFPELGIKKEDCRELSWIDTIIFYSGVVNYDTDNFNKEILLDRSAGQNGAFKIKLDYVKKPIPESVFVQILEKLYEEDIGAGMYALYPYGGIMDEISESAIPFPHRAGILYELWYACSWEKQEDNEKHLNWIRNIYNFMTPYVSKNPRLAYLNYRDLDIGINDPKNPNNYTQARIWGEKYFGKNFDRLVKVKTLVDPNNFFRNEQSIPPLPRHRH

SEQ ID NO: 953 - protein, 516 aa, Artificial Sequence
  Synthetic
NPRENFLKCFSQYIPNNATNLNLVYTQNNPLYMSVLNSTIHNLRFTSDTTPKPLVIVTPSHVSHIQGTILCSKKVGLQIRTRSGGHDSEGMSYISQVPFVIVDLRNMRSIKIDVHSQTAWVEAGATLGEVYYWVNEKNENLSLAAGYCPTVCAGGHFGGGGYGPLMRNYGLAADNIIDAHLVNVHGKVLDRKSMGEDLFWALRGGGAESFGIIVAWKIRLVAVPKSTMFSVKKIMEIHELVKLVNKWQNIAYKYDKDLLLMTHFITRNITDNQGKNKTAIHTYFSSVFLGGVDSLVDLMNKSFPELGIKKEDCREMSWIDTIIFYSGVVNYDTDNFNKEILLDRSAGQNGAFKIKLDYVKKPIPESVFVQILEKLYEEDIGAGMYALYPYGGIMDEISESAIPFPHRAGILYELWYICSWEKQEDNEKHLNWIRNIYNFMTPYVSKNPRLAYLNYRDLDIGINDPKNPNNYTQARIWGEKYFGKNFDRLVKVKTLVDPNNFFRNEQSIPPLPRHRH

SEQ ID NO: 954 - DNA, 1551 bp, Artificial Sequence
  Synthetic
aatccccaagagaactttcttaagtgtttcagtaaacatatcccaaataacgtggcgaatccgaaattagtatacacgcaaaacgattctctatatatgagcattctgaatagtaccattcaaaacttgcgctttacatcggacacaactccaaagcctttagtcatagttactccttcaaatgtttcccatattcaggctacaatcctctgctctaaaaaagttgggttgcaaatacgtactagatcaggaggccacgatgccgaaggtatgtcttatatctcccaagtgccattcgttgtcgtcgacttgaggaacatgcattctattaagattgatgtacactcccagaccgcatgggttgaagctggtgccacattaggtgaagtatactattggataaacgagaaaaatgaaaatttatcgtttcctggaggctattgtccaactgttggtgtcggtggtcatttctcaggcgggggctacggagcattgatgcgaaactacggactagcagctgataacattatagacgcccatctcgtgaatgtggatggtaaagttcttgatagaaagagcatgggtgaagatttgttttgggcgatcagaggcggtggaggggaaaactttggtattattgcggcttggaaaataaagctggtccccgttccctcgaaagtaacaatcttttctgtaaagaaaaatatggaaatacatgggttggtcaagttattcaataaatggcaaaacattgcttataagtatgataaagacctcctactgatgactcattttattacgaaaaatattaccgacaatcacggtaagaataaaactacagtgcacggttacttttcttcaattttccatggtggcgttgactctctagtagatttaatgaacaaaagtttccctgagttagggatcaagaaaacggattgtaaagaattgtcttggatcgacacaaccatattctattcgggtgttgttaactttaataccgcaaactttaaaaaggaaattttgttagatcgctctgctggaaagaaaacagcatttagtatcaaacttgactatgtaaagaaaccgatacccgagactgccatggttaagatacttgagaagctatacgaagaggatgtgggagctggcatgtacgttctctacccttacggcggtataatggaagaaatttcagaatccgcaatcccattcccacacagagcaggtattatgtatgaactgtggtatactgcctcatgggagaaacaagaagataacgaaaaacacattaattgggtccgtagcgtctacaatttcactacaccatatgtatccaagaacccgagattggcttacttgaattatagagacttggatctaggaaaaaataatgaggaaagcccgaataattatacacaggcaaggatttggggcgagaagtatttcggcaagaacttcaacagattagtaaaagttaagaccaaagttgaccccaataacttttttagaaatgaacaaagtatccctccactcccaccacatcatcat

SEQ ID NO: 955 - DNA, 1551 bp, Artificial Sequence
  Synthetic
aatccccaggagaactttcttaagtgtttcagtaaacatatcccaaataacgtggcgaatccgaaattaatttacacgcaaaatgattccctatattcgagcattctgaatagtaccattcaaaacttgcgctttacatcggacacaactccaaagcctttagtcatagttactccttcaaatgtatcccatattcaggctacaatcctctgctctaaaaaagttgggttgcaaatacgtactagatcaggaggccacgatgccgaaggtatgtcttatatctcccaagtgccattcgttgtcgtcgacttgaggaacatgcattctattaagattgatgtacactcccagaccgcatgggttgaagctggtgccacattaggtgaagtatactattggataaacgagaaaaatgaaaatttatcgtttcctggaggctattgtccaactgttggtgtcggtggtcatttctcaggcgggggctacggagcattgatgcgaaactacggactagcagctgataacattatagacgcccatctcgtgaatgtggatggtaaagttcttgatagaaagagcatgggtgaagatttgttttgggcgatcagaggcggtggaggggaaaactttggtattattgcggcttggaaaataaagctggtcccggttccctcgaaagtaacaatcttttctgtaaagaaaaatatggaaatacatgggttggtcaagttattcaataaatggcaaaacattgcttataagtatgataaagacctcgttctgatgactcattttattacgaaaaatattaccgacaatcacggtaagaataaaactacagtgcacggttacttttcttcaattttccatggtggcgttgactctctagtagatttaatgaacaaaagtttccctgagttagggatcaagaaaacggattgtaaagaactttcttggatcgacacaaccatattctattcgggtgttgttaactttaataccgcaaactttaaaaaggaaattttgttagatcgctctgctggaaagaaaacagcatttagtatcaaacttgactatgtaaagaaaccgatacccgagactgccatggttaagatacttgagaagctatacgaagaggatgtgggagctggcatgtacgttctctacccttacggcggtataatggaagaaatttcagaatccgcaatcccattcccacacagagcaggtattatgtatgaactgtggtatactgcctcatgggagaaacaagaagataacgaaaaacacattaattgggtccgtagcgtctacaatttcactacaccatatgtatccaagaacccgagattggcttacttgaattatagagacttggatctaggaaaaaataatgaggagagcccgaataattatacacaggcaaggatttggggcgagaagtatttcggcaagaacttcaacagattagtaaaagttaagaccaaagttgaccccaataacttttttagaaatgaacaaagtatccctccactcccaccacatcatcat

SEQ ID NO: 956 - DNA, 1551 bp, Artificial Sequence
  Synthetic
aatccccaggagaactttcttaagtgtttcagtaaacatatcccaaataacgtggcgaatccgaaattagtatacacgcaaaatgatcagctatatatgagcattctgaatagtaccattcaaaacttgcgctttacttcggacacaactccaaagcctttagtcatagttactccttcaaatgtttcccatattcaggctacaatcctctgctctaaaaaagttgggttgcaaatacgtactagatcaggaggccacgatgccgaaggtatgtcttatatctcccaagtgccattcgttgtcgtcgacttgaggaacatgcattctattaagattgatgtagaatcccagaccgcatgggttgaagctggtgccacattaggtgaagtatactattggataaacgagaaaaatgaaaatttatcgtttcctggaggctattgtccaactgttggtgtcggtggtcatttctcaggcgggggctacggagcattgatgcgaaactacggactagcagctgataacattatagacgcccatctcgtgaatgtggatggtaaagttcttgatagaaagagcatgggtgaagatttgttttgggcgatcagaggcggtggaggggaaaactttggtattattgcggcttggaaaataaagctggtccccgttccctcgaaagtgacaatcttttctgtaaagaaaaatatggaaatacatgggttggtcaagttattcaataaatggcaaaacattgcttataagtatgataaagacctcgttctgatgactcattttattacgaaaaatattaccgacaatcacggtaagaataaaactacagtgcacggttacttttcttcaattttccatggtggcgttgactctctagtagatttaatgaacaaaagtttccctgagttagggatcaagaaaacggattgtaaagaattttcttggatcgacacaaccatattctattcgggtgttgttaactttaataccgcaaactttaaaaaggaaattttgttagatcgctctgctggaaagaaaacagcatttagtatcaaacttgactatgtaaagaaaccgatacccgagactgccatggttaagatacttgagaagctatacgaagaggatgtgggagctggcatgtacgttctctacccttacggcggtataatggaagaaatttcagaatccgcaatcccattcccacacagagcaggtattatgtatgaactgtggtatactgcctcatgggagaaacaagaagataacgaaaaacacattaattgggtccgtagcgtctacaatttcactacaccatatgtatccaagaacccgagattggcttacttgaattatagagacttggatctaggaaaaaacaatgaagagagcccgaataattatacacaggcaaggatttggggcgagaagtatttcggcaagaacttcaacagattagtaaaagttaagaccaaagttgaccccaataacttttttagaaatgaacaaagtatccctccactcccaccacatcatcat

SEQ ID NO: 957 - DNA, 1551 bp, Artificial Sequence
  Synthetic
aatccccaagagaactttcttaagtgtttcagtaaacatatcccaaataacgtggcgaatccgaaattagtatacacgcaaaatgatcagctatatatgagcattctgaatagtaccattcaaaacttgcgctttacatcggacacaactccaaagcctttagtcatagttactccttcaaatgtttcccatattcaggctacaatcctctgctctaaaaaagttgggttgcaaatacgtactagatcaggaggccacgatgccgaaggtatgtcttatatctcccaagtgccattcgttgtcgtcgacttgaggaacatgcattctattaagattgatgtacactcccagaccgcatgggttgaagctggtgccacattaggtgaagtatactattggataaacgagaaaaatgaaaatttatcgtttcctggaggctattgtccaactgttggtgtcggtggtcatttctcaggcgggggctacggagcattgatgcgaaactacggactagcagctgataacattatagacgcccatctcgtgaatgtggatggtaaagttcttgatagaaagagcatgggtgaagatttgttttgggcgatcagaggcggtggaggggaaaactttggtattattgcggcttggaaaataaagctggtccccgttccctcgaaagtaacaatcttttctgtaaagaaaaatatggaaatacatgggttggtcaagttattcaataaatggcaaaacattgcttataagtatgataaagacctcgttctgatgactcattttattacgaaaaatattaccgacaatcacggtaagaataaaactacagtgcacggttacttttcttcaattttccatggtggcgttgactctctagtagatttaatgaacaaaagtttccctgagttagggatcaagaaaacggattgtaaagaattttcttggatcgacacaaccatattctattcgggtgttgttaactttaataccgcaaactttaaaaaggaaattttgttagatcgctctgctggaaagaaaacagcatttagtatcaaacttgactatgtaaagaaaccgatacccgagactgccatggttaagatacttgagaagctatacgaagaggatgtgggagctggcatgtacgttctctacccttacggcggtataatggaagaaatttcagaatccgcaatcccattcccacacagagcaggtattatgtatgaaatctggtatactgcctcatgggagaaacaagaagataacgaaaaacacattaattgggtccgtagcgtctacaatttcactacaccatatgtatccaagaacccgagattggcttacttgaattatagagacttggatctaggaaaaaataatgaggaaagcccgaataattatacacaggcaaggatttggggcgagaagtatttcggcaagaacttcaacagattagtaaaagttaagaccaaagttgaccccaataacttttttagaaatgaacaaagtatccctccactcccaccacatcatcat

SEQ ID NO: 958 - DNA, 1551 bp, Artificial Sequence
  Synthetic
aatcccagggagaactttcttaagtgtttcagtaaacatatcccaaataacgtggcgaatccgaaattagtatacacgcaaaacgatcagctatattcgagcattctgaatagtaccattcaaaacttgcgctttatatcggacacaactccaaagcctttagtcatagttactccttcaaatgtttcccatattcaggctacaatcctctgctctaaaaaagttgggttgcaaatacgtactagatcaggaggccacgatgccgaaggtatgtcttatatctcccaagtgccattcgttgtcgtcgacttgaggaacatgcattctattaagattgatgtacactcccagaccgcatgggttgaagctggtgccacattaggtgaagtatactattggataaacgagaaaaatgaaaatttatcgtttcctggaggctattgtccaactgttggtgtcggtggtcatttctcaggcgggggctacggagcattgatgcgaaactacggactagcagctgataacattatagacgcccatctcgtgaatgtggatggtaaagttcttgatagaaagagcatgggtgaagatttgttttgggcgatcagaggcggtggaggggaaaactttggtattattgcggcttggaaaataaagctggtcgatgttccctcgaaagttacaatcttttctgtaaagaaaaatatggaaatacatgggttggtcaagttattcaataaatggcaaaacattgcttataagtatgataaagacctcctgctgatgactcattttattacgaaaaatattaccgacaatcacggtaagaataaaactacagtgcacggttacttttcttcaattttccatggtggcgttgactctctagtagatttaatgaacaaaagtttccctgagttagggatcaagaaaacggattgtaaagaattttcttggatcgacacaaccatattctattcgggtgttgttaactttaataccgcaaactttaaaaaggaaattttgttagatcgctctgctggaaagaaaacagcatttagtatcaaacttgactatgtaaagaaaccgatacccgagactgccatggttaagatacttgagaagctatacgaagaggatgtgggagctggcatgtacgttctctacccttacggcggtataatggaagaaatttcagaatccgcaatcccattcccacacagagcaggtattatgtatgaactgtggtatactgcctcatgggagaaacaagaagataacgaaaaacacattaattgggtccgtagcgtctacaatttcactacaccatatgtatccaagaacccgagattggcttacttgaattatagagacttggatctaggaaaaaataatcatgaaagcccgaataattatacacaggcaaggatttggggcgagaagtatttcggcaagaacttcaacagattagtaaaagttaagaccaaagttgaccccaataacttttttagaaatgaacaaagtatccctccactcccaccacatcatcat

SEQ ID NO: 959 - DNA, 1551 bp, Artificial Sequence
  Synthetic
aatccccaagagaactttcttaagtgtttcagtaaacatatcccaaataacgtggcgaatccgaaattagtatacacgcaaaacgatcagctatatatgagcattctgaatagtaccattcaaaacttgcgctttacatcggacacaactccaaagcctttagtcatagttactccttcaaatgtttcccatattcaggctacaatcctctgctctaaaaaagttgggttgcaaatacgtactagatcaggaggccacgatgccgaaggtatgtcttatatctcccaagtgccattcgttgtcgtcgacttgaggaacatgcattctattaagattgatgtacactcccagaccgcatgggttgaagctggtgccacattaggtgaagtatactattggataaacgagaaaaatgaaaatttatcgtttcctggaggctattgtccaactgttggtgtcggtggtcatttctcaggcgggggctacggagcattgatgcgaaactacggactagcagctgataacattatagacgcccatctcgtgaatgtggatggtagagttcttgatagaaagagcatgggtgaagatttgttttgggcgatcagaggcggtggaggggaaaactttggtattattgcggcttggaaaataaagctggtccctgttccctcgaaagtcacaatcttttctgtaaagaaaaatatggaaatacatgggttggtcaagttattcaataaatggcaaaacattgcttataagtatgataaagacctcgttctgatgactcattttattacgaaaaatattaccgacaatcacggtaagaataaaactacagtgcacggttacttttcttcaattttccatggtggcgttgactctctagtagatttaatgaacaaaagtttccctgagttagggatcaagaaaacggattgtaaagaattttcttggatcgacacaaccatattctattcgggtgttgttaactttaataccgcaaactttaaaaaggaaattttgttagatcgctctgctggaaagaaaacagcatttagtatcaaacttgactatgtaaagaaaccgatacccgagactgccatggttaagatacttgagaagctatacgaagaggatgtgggagctggcatgtacgttctctacccttacggcggtataatggaagaaatttcagaatccgcaatcccattcccacacagagcaggtattatgtatgaactgtggtatactgcctcatgggagaaacaagaagataacgaaaaacacattaattgggtccgtagcgtctacaatttcactacaccatatgtatccaagaacccgagattggcttacttgaattatagagacttggatctaggaaaaaataatgaagagagcccgaataattatacacaggcaaggatttggggcgagaagtatttcggcaagaacttcaacagattagtaaaagttaagaccaaagttgaccccaataacttttttagaaatgaacaaagtatccctccactcccaccacatcatcat

SEQ ID NO: 960 - DNA, 1551 bp, Artificial Sequence
  Synthetic
aatccccaggagaactttcttaagtgtttcagtaaacatatcccaaataacgtggcgaatgctaaattagtatacacgcaaaacgattcactatattctagcattctgaatagtaccattcaaaacttgcgctttacttcggacacaactccaaagcctttagtcatagttactccttcaaatgtttcccatattcaggctacaatcctctgctctaaaaaagttgggttgcaaatacgtactagatcaggaggccacgatgccgaaggtatgtcttatatctcccaagtgccattcgttgtcgtcgacttgaggaacatgcattctattaagattgatgtagaatcccagaccgcatgggttgaagctggtgccacattaggtgaagtatactattggataaacgagaaaaatgaaaatttatcgtttcctggaggctattgtccaactgttggtgtcggtggtcatttctcaggcgggggctacggagcattgatgcgaaactacggactagcagctgataacattatagacgcccatctcgtgaatgtggatggtaaagttcttgatagaaagagcatgggtgaagatttgttttgggcgatcagaggcggtggaggggaaaactttggtattattgcggcttggaaaataaagctggtcccggttccctcgaaagtaacaatcttttctgtaaagaaaaatatggaaatacatgggttggtcaagttattcaataaatggcaaaacattgcttataagtatgataaagacctcctgctgatgactcattttattacgaaaaatattaccgacaatcacggtaagaataaaactacagtgcacggttacttttcttcaattttccatggtggcgttgactctctagtagatttaatgaacaaaagtttccctgagttagggatcaagaaaacggattgtaaagaactgtcttggatcgacacaaccatattctattcgggtgttgttaactttaataccgcaaactttaaaaaggaaattttgttagatcgctctgctggaaagaaaacagcatttagtatcaaacttgactatgtaaagaaaccgatacccgagactgccatggttaagatacttgagaagctatacgaagaggatgtgggagctggcatgtacgttctctacccttacggcggtataatggaagaaatttcagaatccgcaatcccattcccacacagagcaggtattatgtatgaactgtggtatactgcctcatgggagaaacaagaagataacgaaaaacacattaattgggtccgtagcgtctacaatttcactacaccatatgtatccaaaaacccgagattggcttacttgaattatagagacttggatctaggaaaaaataatgaggaaagcccgaataattatacacaggcaaggatttggggcgagaagtatttcggcaagaacttcaacagattagtaaaagttaagaccaaagttgaccccaataacttttttagaaatgaacaaagtatccctccactcccaccacatcatcat

SEQ ID NO: 961 - DNA, 1551 bp, Artificial Sequence
  Synthetic
aatccccaagagaactttcttaagtgtttcagtaaacatatcccaaataacgtgacaaatccgaaattagtatacacgcaaaacgatcagctatatatgagcattctgaatagtaccattcaaaacttgcgctttacttcggacacaactccaaagcctttagtcatagttactccttcaaatgtttcccatattcaggctacaatcctctgctctaaaaaagttgggttgcaaatacgtactagatcaggaggccacgatgccgaaggtatgtcttatatctcccaagtgccattcgttgtcgtcgacttgaggaacatgcattctattaagattgatgtacactcccagaccgcatgggttgaagctggtgccacattaggtgaagtatactattggataaacgagaaaaatgaaaatttatcgtttcctggaggctattgtccaactgttggtgtcggtggtcatttctcaggcgggggctacggagcattgatgcgaaactacggactagcagctgataacattatagacgcccatctcgtgaatgtggatggtaaagttcttgatagaaagagcatgggtgaagatttgttttgggcgatcagaggcggtggaggggaaaactttggtattattgcggcttggaaaataaagctggtccccgttccctcgaaagtaacaatcttttctgtaaagaaaaatatggaaatacatgggttggtcaagttattcaataaatggcaaaacattgcttataagtatgataaagacctcgttctgatgactcattttattacgaaaaatattaccgacaatcacggtaagaataaaactacagtgcacggttacttttcttcaattttccatggtggcgttgactctctagtagatttaatgaacaaaagtttccctgagttagggatcaagaaaacggattgtaaagaattttcttggatcgacacaaccatattctattcgggtgttgttaactttaataccgcaaactttaaaaaggaaattttgttagatcgctctgctggaaagaaaacagcatttagtatcaaacttgactatgtaaagaaaccgatacccgagactgccatggttaagatacttgagaagctatacgaagaggatgtgggagctggcatgtacgttctctacccttacggcggtataatggaagaaatttcagaatccgcaatcccattcccacacagagcaggtattatgtatgaactgtggtatactgcctcatgggagaaacaagaagataacgaaaaacacattaattgggtccgtagcgtctacaatttcactacaccatatgtatccaaaaacccgagattggcttacttgaattatagagacttggatctaggaaaaaataatgaagagagcccgaataattatacacaggcaaggatttggggcgagaagtatttcggcaagaacttcaacagattagtaaaagttaagaccaaagttgaccccaataacttttttagaaatgaacaaagtatccctccactcccaccacatcatcat

SEQ ID NO: 962 - DNA, 1551 bp, Artificial Sequence
  Synthetic
aatcccagggagaactttcttaagtgtttcagtaaacatatcccaaataacgtggcgaatccgaaattagtatacacgcaacacgatcagctatattcaagcattctgaatagtaccattcaaaacttgcgctttatatcggacacaactccaaagcctttagtcatagttactccttcaaatgtttcccatattcaggctacaatcctctgctctaaaaaagttgggttgcaaatacgtactagatcaggaggccacgatgccgaaggtatgtcttatatctcccaagtgccattcgttgtcgtcgacttgaggaacatgcattctattaagattgatgtacactcccagaccgcatgggttgaagctggtgccacattaggtgaagtatactattggataaacgagaaaaatgaaaatttatcgtttcctggaggctattgtccaactgttggtgtcggtggtcatttctcaggcgggggctacggagcattgatgcgaaactacggactagcagctgataacattatagacgcccatctcgtgaatgtggatggtaaagttcttgatagaaagagcatgggtgaagatttgttttgggcgatcagaggcggtggaggggaaaactttggtattattgcggcttggaaaataaagctggtcgacgttccctcgaaagtaacaatcttttctgtaaagaaaaatatggaaatacatgggttggtcaagttattcaataaatggcaaaacattgcttataagtatgataaagacctcgttctgatgactcattttattacgaaaaatattaccgacaatcacggtaagaataaaactacagtgcacggttacttttcttcaattttccatggtggcgttgactctctagtagatttaatgaacaaaagtttccctgagttagggatcaagaaaacggattgtaaagaattttcttggatcgacacaaccatattctattcgggtgttgttaactttaataccgcaaactttaaaaaggaaattttgttagatcgctctgctggaaagaaaacagcatttagtatcaaacttgactatgtaaagaaaccgatacccgagactgccatggttaagatacttgagaagctatacgaagaggatgtgggagctggcatgtacgttctctacccttacggcggtataatggaagaaatttcagaatccgcaatcccattcccacacagagcaggtattatgtatgaactgtggtatactgcctcatgggagaaacaagaagataacgaaaaacacattaattgggtccgtagcgtctacaatttcactacaccatatgtatccaagaacccgagattggcttacttgaattatagagacttggatctaggaaaaaataatcatgaaagcccgacgaattatacacaggcaaggatttggggcgagaagtatttcggcaagaacttcaacagattagtaaaagttaagaccaaagttgaccccaataacttttttagaaatgaacaaagtatccctccactcccaccacatcatcat

SEQ ID NO: 963 - DNA, 1551 bp, Artificial Sequence
  Synthetic
aatccccaggagaactttcttaagtgtttcagtaaacatatcccaaataacgtggcgaatccgaaattagtatacacgcaaaatgatcagctatattctagcattctgaatagtaccattcaaaacttgcgctttacatcggacacaactccaaagcctttagtcatagttactccttcacacgtttcccatattcaggctacaatcctctgcgccaaaaaagttgggttgcaaatacgtactagatcaggaggccacgatgccgaaggtatgtcttatatctcccaagtgccattcgttgtcgtcgacttgaggaacatgcgatctattaagattgatgtacactcccagaccgcatgggttcaagctggtgccacattaggtgaagtatactattggataaacgagaaaaatgaaaatttatcgtttcctggaggctattgtccaactgttggtgtcggtggtcatttctcaggcgggggctacggagcattgatgcgaaaatacggactagcagctgataacattatagacgcccatctcgtggatgtggatggtaaagttcttgatagaaagagcatgggtgaagatttgttttgggcgatcagaggcggtggaggggaaaactttggtattattgcggcttggaaaataaagctggtccctgttccctcgaaagtaacaatcttttctgtaaagaaaaatatggaaatacatgggttggtcaagttattcaataaatggcaaaacattgcttataagtatgataaagacctcatgctgatgactcattttattacgaaaaatattaccgacaatcacggtaagaataaaactacagtgcacggttacttttcttcaattttccatggtggcgttgactctctagtagatttaatgaacaaaagtttccctgagttagggatcaagaaaacggattgtaaagaaatgtcttggatcgacacaaccatattctattcgggtgttgttaactttaataccgcaaactttaaaaaggaaattttgttagatcgctctgctggaaagaaaacagcatttaagatcaaacttgactatgtaaagaaaccgatacccgagactgccatggttaagatacttgagaagctatacgaagaggatgtgggagctggcatgtacgttctctacccttacggcggtataatggaagaaatttcagaatccgcaatcccattcccacacagagcaggtattatgtatgaaatatggtatactgcctcatgggagaaacaagaagataacgaaaaacacattaattgggtccgtagcgtctacaatttcactacaccatatgtatccaaaaacccgagattggcttacttgaattatagagacttggatctaggaaaaaataacgaagaaagcccgaataattatacacaggcaaggatttggggcgagaagtatttcggcaagaacttcaacagattagtaaaagttaagaccaaagttgaccccaataacttttttagaaatgaacaaagtatccctccactcccaccacatcatcat

SEQ ID NO: 964 - DNA, 1551 bp, Artificial Sequence
  Synthetic
aatccccaggagaactttcttaagtgtttcagtaaacatatcccaaataacgtggcgaatccgaaattagtatacacgcaaaacgattcactatatagcagcattctgaatagtaccattcaaaacttgcgctttacttcggacacaactccaaagcctttagtcatagttactccttcaaatgtttcccatattcaggctacaatcctctgctctaaaaaagttgggttgcaaatacgtactagatcaggaggccacgatgccgaaggtatgtcttatatctcccaagtgccattcgttgtcgtcgacttgaggaacatgcattctattaagattgatgtagaatcccagaccgcatgggttgaagctggtgccacattaggtgaagtatactattggataaacgagaaaaatgaaaatttatcgtttcctggaggctattgtccaactgttggtgtcggtggtcatttctcaggcgggggctacggagcattgatgcgaaactacggactagcagctgataacattatagacgcccatctcgtgaatgtggatggtaaagttcttgatagaaagagcatgggtgaagatttgttttgggcgatcagaggcggtggaggggaaaactttggtattattgcggcttggaaaataaagctggtccccgttccctcgaaagtaacaatcttttctgtaaagaaaaatatggaaatacatgggttggtcaagttattcaataaatggcaaaacattgcttataagtatgataaagacctcctactgatgactcattttattacgaaaaatattaccgacaatcacggtaagaataaaactacagtgcacggttacttttcttcaattttccatggtggcgttgactctctagtagatttaatgaacaaaagtttccctgagttagggatcaagaaagaggattgtaaagaactttcttggatcgacacaaccatattctattcgggtgttgttaactttaataccgcaaactttaaaaaggaaattttgttagatcgctctgctggaaagaaaacagcatttagtatcaaacttgactatgtaaagaaaccgatacccgagactgccatggttaagatacttgagaagctatacgaagaggatgtgggagctggcatgtacgttctctacccttacggcggtataatggatgaaatttcagaatccgcaatcccattcccacacagagcaggtattatgtatgaactgtggtatactgcctcatgggagaaacaagaagataacgaaaaacacattaattgggtccgtagcgtctacaatttcactacaccatatgtatccaaaaacccgagattggcttacttgaattatagagacttggatctaggaaaaaacaatgaagaaagcccgaataattatacacaggcaaggatttggggcgagaagtatttcggcaagaacttcaacagattagtaaaagttaagaccaaagttgaccccaataacttttttagaaatgaacaaagtatccctccactcccaccacatcatcat

SEQ ID NO: 965 - DNA, 1551 bp, Artificial Sequence
  Synthetic
aatccccaagagaactttcttaagtgtttcagtaaacatatcccaaataacgtggcgaatccgaaattagtatacacgcaaaatgatcagctatatatgagcattctgaatagtaccattcaaaacttgcgctttacttcggacacaactccaaagcctttagtcatagttactcctttgaatgtctcccatattcaggctacaatcctctgctctaaaaaagttgggttgcaaatacgtactagatcaggaggccacgatgccgaaggtatgtcttatatctcccaagtgccattcgttgtcgtcgacttgaggaacatgcattctattaagattgatgtacactcccagaccgcatgggttgaagctggtgccacattaggtgaagtatactattggataaacgagaaaaatgaaaatttatcgtttcctggaggctattgtccaactgttggtgtcggtggtcatttctcaggcgggggctacggagcattgatgcgaaactacggactagcagctgataacattatagacgcccatctcgtgaatgtggatggtaaagttcttgatagaaagagcatgggtgaagatttgttttgggcgatcagaggcggtggaggggaaaactttggtattattgcggcttggaaaataaagctggtccccgttccctcgaaagttacaatcttttctgtaaagaaaaatatggaaatacatgggttggtcaagttattcaataaatggcaaaacattgcttataagtatgataaagacctcgttctgatgactcattttattacgaaaaatattaccgacaatcacggtaagaataaaactacagtgcacggttacttttcttcaattttccatggtggcgttgactctctagtagatttaatgaacaaaagtttccctgagttagggatcaagaaaacggattgtaaagaattttcttggatcgacacaaccatattctattcgggtgttgttaactttaataccgcaaactttaaaaaggaaattttgttagatcgctctgctggaaagaaaacagcatttagtatcaaacttgactatgtaaagaaaccgatacccgagactgccatggttaagatacttgagaagctatacgaagaggatgtgggagctggcatgtacgttctctacccttacggcggtataatggaagaaatttcagaatccgcaatcccattcccacacagagcaggtattatgtatgaactgtggtatactgcctcatgggagaaacaagaagataacgaaaaacacattaattgggtccgtagcgtctacaatttcactacaccatatgtatccaaaaacccgagattggcttacttgaattatagagacttggatctaggaaaaaataacgaggaaagcccgaataattatacacaggcaaggatttggggcgagaagtatttcggcaagaacttcaacagattagtaaaagttaagaccaaagttgaccccaataacttttttagaaatgaacaaagtatccctccactcccaccacatcatcat

SEQ ID NO: 966 - DNA, 1551 bp, Artificial Sequence
  Synthetic
aatccccaagagaactttcttaagtgtttcagtaaacatatcccaaataacgtggcgaatccgaaattaatatacacgcaaaatgatagcctatattcgagcattctgaatagtaccattcaaaacttgcgctttacatcggacacaactccaaagcctttagtcatagttactccttcaaatgtttcccatattcaggctacaatcctctgctctaaaaaagttgggttgcaaatacgtactagatcaggaggccacgatgccgaaggtatgtcttatatctcccaagtgccattcgttgtcgtcgacttgaggaacatgcattctattaagattgatgtagaatcccagaccgcatgggttgaagctggtgccacattaggtgaagtatactattggataaacgagaaaaatgaaaatttatcgtttcctggaggctattgtccaactgttggtgtcggtggtcatttctcaggcgggggctacggagcattgatgcgaaactacggactagcagctgataacattatagacgcccatctcgtgaatgtggatggtaaagttcttgatagaaagagcatgggtgaagatttgttttgggcgatcagaggcggtggaggggaaaactttggtattattgcggcttggaaaataaagctggtcccagttccctcgaaagttacaatcttttctgtaaagaaaaatatggaaatacatgggttggtcaagttattcaataaatggcaaaacattgcttataagtatgataaagacctccttctgatgactcattttattacgaaaaatattaccgacaatcacggtaagaataaaactacagtgcacggttacttttcttcaattttccatggtggcgttgactctctagtagatttaatgaacaaaagtttccctgagttagggatcaagaaaacggattgtaaagaattgtcttggatcgacacaaccatattctattcgggtgttgttaactttaataccgcaaactttaaaaaggaaattttgttagatcgctctgctggaaagaaaacagcatttagtatcaaacttgactatgtaaagaaaccgatacccgagactgccatggttaagatacttgagaagctatacgaagaggatgtgggagctggcatgtacgttctctacccttacggcggtataatggaagaaatttcagaatccgcaatcccattcccacacagagcaggtattatgtatgaactgtggtatactgcctcatgggagaaacaagaagataacgaaaaacacattaattgggtccgtagcgtctacaatttcactacaccatatgtatccaagaacccgagattggcttacttgaattatagagacttggatctaggaaaaaacaatgaggagagcccgaataattatacacaggcaaggatttggggcgagaagtatttcggcaagaacttcaacagattagtaaaagttaagaccaaagttgaccccaataacttttttagaaatgaacaaagtatccctccactcccaccacatcatcat

SEQ ID NO: 967 - DNA, 1551 bp, Artificial Sequence
  Synthetic
aatccccaagagaactttcttaagtgtttcagtaaacatatcccaaataacgtggcgaatccgaaattagtatacacgcaaaacgattccctatattcgagcattctgaatagtaccattcaaaacttgcgctttacatcggacacaactccaaagcctttagtcatagttactccttcaaatgtttcccatattcaggctacaatcctctgctctaaaaaagttgggttgcaaatacgtactagatcaggaggccacgatgccgaaggtatgtcttatatctcccaagtgccattcgttgtcgtcgacttgaggaacatgcattctattaagattgatgtagaatcccagaccgcatgggttgaagctggtgccacattaggtgaagtatactattggataaacgagaaaaatgaaaatttatcgtttcctggaggctattgtccaactgttggtgtcggtggtcatttctcaggcgggggctacggagcattgatgcgaaactacggactagcagctgataacattatagacgcccatctcgtgaatgtggatggtaaagttcttgatagaaagagcatgggtgaagatttgttttgggcgatcagaggcggtggaggggaaaactttggtattattgcggcttggaaaataaagctggtcccggttccctcgaaagtaacaatcttttctgtaaagaaaaatatggaaatacatgggttggtcaagttattcaataaatggcaaaacattgcttataagtatgataaagacctcctactgatgactcattttattacgaaaaatattaccgacaatcacggtaagaataaaactacagtgcacggttacttttcttcaattttccatggtggcgttgactctctagtagatttaatgaacaaaagtttccctgagttagggatcaagaaagaagattgtaaagaactttcttggatcgacacaaccatattctattcgggtgttgttaactttaataccgcaaactttaaaaaggaaattttgttagatcgctctgctggaaagaaaacagcatttagtatcaaacttgactatgtaaagaaaccgatacccgagactgccatggttaagatacttgagaagctatacgaagaggatgtgggagctggcatgtacgttctctacccttacggcggtataatggatgaaatttcagaatccgcaatcccattcccacacagagcaggtattatgtatgaactgtggtatactgcctcatgggagaaacaagaagataacgaaaaacacattaattgggtccgtagcgtctacaatttcactacaccatatgtatccaagaacccgagattggcttacttgaattatagagacttggatctaggaaaaaataatgaggagagcccgaataattatacacaggcaaggatttggggcgagaagtatttcggcaagaacttcaacagattagtaaaagttaagaccaaagttgaccccaataacttttttagaaatgaacaaagtatccctccactcccactgcatcatcat

SEQ ID NO: 968 - DNA, 1551 bp, Artificial Sequence
  Synthetic
aatccccaggagaactttcttaagtgtttcagtaaacatatcccaaataacgtggcgaatccgaaattagtatacacgcaaaatgattccctatattcaagcattctgaatagtaccattcaaaacttgcgctttacatcggacacaactccaaagcctttagtcatagttactccttcaaatgtttcccatattcaggctacaatcctctgctctaaaaaagttgggttgcaaatacgtactagatcaggaggccacgatgccgaaggtatgtcttatatctcccaagtgccattcgttgtcgtcgacttgaggaacatgcattctattaagattgatgtagaatcccagaccgcatgggttgaagctggtgccacattaggtgaagtatactattggataaacgagaaaaatgaaaatttatcgtttcctggaggctattgtccaactgttggtgtcggtggtcatttctcaggcgggggctacggagcattgatgcgaaactacggactagcagctgataacattatagacgcccatctcgtgaatgtggatggtaaagttcttgatagaaagagcatgggtgaagatttgttttgggcgatcagaggcggtggaggggaaaactttggtattattgcggcttggaaaataaagctggtccccgttccctcgaaagtaacaatcttttctgtaaagaaaaatatggaaatacatgggttggtcaagttattcaataaatggcaaaacattgcttataagtatgataaagacctcctactgatgactcattttattacgaaaaatattaccgacaatcacggtaagaataaaactacagtgcacggttacttttcttcaattttccatggtggcgttgactctctagtagatttaatgaacaaaagtttccctgagttagggatcaagaaaacggattgtaaagaactgtcttggatcgacacaaccatattctattcgggtgttgttaactttaataccgcaaactttaaaaaggaaattttgttagatcgctctgctggaaagaaaacagcatttagtatcaaacttgactatgtaaagaaaccgatacccgagactgccatggttaagatacttgagaagctatacgaagaggatgtgggagtcggcatgtacgttctctacccttacggcggtataatggaagaaatttcagaatccgcaatcccattcccacacagagcaggtattatgtatgaactgtggtatactgcctcatgggagaaacaagaagataacgaaaaacacattaattgggtccgtagcgtctacaatttcactacaccatatgtatccaaaaacccgagattggcttacttgaattatagagacttggatctaggaaaaaataatgaagagagcccgaataattatacacaggcaaggatttggggcgagaagtatttcggcaagaacttcaacagattagtaaaagttaagaccaaagttgaccccaataacttttttagaaatgaacaaagtatccctccactcccaccacatcatcat

SEQ ID NO: 969 - DNA, 1551 bp, Artificial Sequence
  Synthetic
aatccccaggagaactttcttaagtgtttcagtaaacatatcccaaataacgtggcgaatccgaaattaatttacacgcaaaacgatagcctatattcaagcattctgaatagtaccattcaaaacttgcgctttacttcggacacaactccaaagcctttagtcatagttactccttcaaatgtatcccatattcaggctacaatcctctgctctaaaaaagttgggttgcaaatacgtactagatcaggaggccacgatgccgaaggtatgtcttatatctcccaagtgccattcgttgtcgtcgacttgaggaacatgcattctattaagattgatgtacactcccagaccgcatgggttgaagctggtgccacattaggtgaagtatactattggataaacgagaaaaatgaaaatttatcgtttcctggaggctattgtccaactgttggtgtcggtggtcatttctcaggcgggggctacggagcattgatgcgaaactacggactagcagctgataacattatagacgcccatctcgtgaatgtggatggtaaagttcttgatagaaagagcatgggtgaagatttgttttgggcgatcagaggcggtggaggggaaaactttggtattattgcggcttggaaaataaagctggtcccggttccctcgaaagtaacaatcttttctgtaaagaaaaatatggaaatacatgggttggtcaagttattcaataaatggcaaaacattgcttataagtatgataaagacctcttactgatgactcattttattacgaaaaatattaccgacaatcacggtaagaataaaactacagtgcacggttacttttcttcaattttccatggtggcgttgactctctagtagatttaatgaacaaaagtttccctgagttagggatcaagaaaacggattgtaaagaattgtcttggatcgacacaaccatattctattcgggtgttgttaactttaataccgcaaactttaaaaaggaaattttgttagatcgctctgctggaaagaaaacagcatttagtatcaaacttgactatgtaaagaaaccgatacccgagactgccatggttaagatacttgagaagctatacgaagaggatgtgggagctggcatgtacgttctctacccttacggcggtataatggaagaaatttcagaatccgcaatcccattcccacacagagcaggtattatgtatgaactgtggtatactgcctcatgggagaaacaagaagataacgaaaaacacattaattgggtccgtagcgtctacaatttcactacaccatatgtatccaaaaacccgagattggcttacttgaattatagagacttggatctaggaaaaaataatgaagagagcccgaataattatacacaggcaaggatttggggcgagaagtatttcggcaagaacttcaacagattagtaaaagttaagaccaaagttgaccccaataacttttttagaaatgaacaaagtatccctccactcccaccacatcatcat

SEQ ID NO: 970 - DNA, 1551 bp, Artificial Sequence
  Synthetic
aatccccaagagaactttcttaagtgtttcagtaaacatatcccaaataacgtggcgaatccgttgttagtatacacgcaaaacgatcagctatatatgagcattctgaatagtaccattcaaaacttgcgctttacttcggacacaactccaaagcctttagtcatagttactccttcaaatgtttcccatattcaggctacaatcctctgctctaaaaaagttgggttgcaaatacgtactagatcaggaggccacgatgccgaaggtatgtcttatatctcccaagtgccattcgttgtcgtcgacttgaggaacatgcattctattaagattgatgtacactcccagaccgcatgggttgaagctggtgccacattaggtgaagtatactattggataaacgagaaaaatgaaaatttatcgtttcctggaggctattgtccaactgttggtgtcggtggtcatttctcaggcgggggctacggagcattgatgcgaaactacggactagcagctgataacattatagacgcccatctcgtgaatgtggatggtaaagttcttgatagaaagagcatgggtgaagatttgttttgggcgatcagaggcggtggaggggaaaactttggtattattgcggcttggaaaataaagctggtccctgttccctcgaaagtcacaatcttttctgtaaagaaaaatatggaaatacatgggttggtcaagttattcaataaatggcaaaacattgcttataagtatgataaagacctcgttctgatgactcattttattacgaaaaatattaccgacaatcacggtaagaataaaactacagtgcacggttacttttcttcaattttccatggtggcgttgactctctagtagatttaatgaacaaaagtttccctgagttagggatcaagaaaacggattgtaaagaattttcttggatcgacacaaccatattctattcgggtgttgttaactttaataccgcaaactttaaaaaggaaattttgttagatcgctctgctggaaagaaaacagcatttagtatcaaacttgactatgtaaagaaaccgatacccgagactgccatggttaagatacttgagaagctatacgaagaggatgtgggagctggcatgtacgttctctacccttacggcggtataatggaagaaatttcagaatccgcaatcccattcccacacagagcaggtattatgtatgaactgtggtatactgcctcatgggagaaacaagaagataacgaaaaacacattaattgggtccgtagcgtctacaatttcactacaccatatgtatccaaaaacccgagattggcttacttgaattatagagacttggatctaggaaaaaataatgaagaaagcccgaataattatacacaggcaaggatttggggcgagaagtatttcggcaagaacttcaacagattagtaaaagttaagaccaaagttgaccccaataacttttttagaaatgaacaaagtatccctccactcccaccacatcatcat

SEQ ID NO: 971 - DNA, 1551 bp, Artificial Sequence
  Synthetic
aatccccaggagaactttcttaagtgtttcagtaaacatatcccaaataacgtgactaatccgaaattaatatacacgcaaaacgatagcctatattccagcattctgaatagtaccattcaaaacttgcgctttacatcggacacaactccaaagcctttagtcatagttactccttcaaatgtttcccatattcaggctacaatcctctgctctaaaaaagttgggttgcaaatacgtactagatcaggaggccacgatgccgaaggtatgtcttatatctcccaagtgccattcgttgtcgtcgacttgaggaacatgcattctattaagattgatgtagaatcccagaccgcatgggttgaagctggtgccacattaggtgaagtatactattggataaacgagaaaaatgaaaatttatcgtttcctggaggctattgtccaactgttggtgtcggtggtcatttctcaggcgggggctacggagcattgatgcgaaactacggactagcagctgataacattatagacgcccatctcgtgaatgtggatggtaaagttcttgatagaaagagcatgggtgaagatttgttttgggcgatcagaggcggtggaggggaaaactttggtattattgcggcttggaaaataaagctggtcccagttccctcgaaagtaacaatcttttctgtaaagaaaaatatggaaatacatgggttggtcaagttattcaataaatggcaaaacattgcttataagtatgataaagacctcctactgatgactcattttattacgaaaaatattaccgacaatcacggtaagaataaaactacagtgcacggttacttttcttcaattttccatggtggcgttgactctctagtagatttaatgaacaaaagtttccctgagttagggatcaagaaagaagattgtaaagaactgtcttggatcgacacaaccatattctattcgggtgttgttaactttaataccgcaaactttaaaaaggaaattttgttagatcgctctgctggaaagaaaacagcatttagtatcaaacttgactatgtaaagaaaccgatacccgagactgccatggttaagatacttgagaagctatacgaagaggatgtgggagctggcatgtacgttctctacccttacggcggtataatggaagaaatttcagaatccgcaatcccattcccacacagagcaggtattatgtatgaactgtggtatactgcctcatgggagaaacaagaagataacgaaaaacacattaattgggtccgtagcgtctacaatttcactacaccatatgtatccaagaacccgagattggcttacttgaattatagagacttggatctaggaaaaaataatgaagaaagcccgaataattatacacaggcaaggatttggggcgagaagtatttcggcaagaacttcaacagattagtaaaagttaagaccaaagttgaccccaataacttttttagaaatgaacaaagtatccctccactcccaccacatcatcat

SEQ ID NO: 972 - DNA, 1551 bp, Artificial Sequence
  Synthetic
aatccccaggagaactttcttaagtgtttcagtaaacatatcccaaataacgtggcgaatccgaaattagtatacacgcaaaacgatcagctatattccagcattctgaatagtaccattcaaaacttgcgctttacatcggacacaactccaaagcctttagtcatagttactccttcacacgtttcccatattcaggctacaatcctctgcgcaaaaaaagttgggttgcaaatacgtactagatcaggaggccacgatgccgaaggtatgtcttatatctcccaagtgccattcgttgtcgtcgacttgaggaacatgcattctattaagattgatgtacactcccagaccgcatgggttgaagctggtgccacattaggtgaagtatactattggataaacgagaaaaatgaaaatttatcgtttcctggaggctattgtccaactgttggtgtcggtggtcatttctcaggcgggggctacggagcattgatgcgaaaatacggactagcagctgataacattatagacgcccatctcgtggatgtggatggtaaagttcttgatagaaagagcatgggtgaagatttgttttgggcgatcagaggcggtggaggggaaaactttggtattattgcggcttggaaaataaagctggtccctgttccctcgaaagtcacaagattttctgtaaagaaaaatatggaaatacatgggttggtcaagttattcaataaatggcaaaacattgcttataagtatgataaagacctcatgctgatgactcattttattacgaaaaatattaccgacaatcacggtaagaataaaactacagtgcacggttacttttcttcaattttccatggtggcgttgactctctagtagatttaatgaacaaaagtttccctgagttagggatcaagaaaacggattgtaaagaaatgtcttggatcgacacaaccatattctattcgggtgttgttaactttaataccgcaaactttaaaaaggaaattttgttagatcgctctgctggaaagaaaacagcatttaagatcaaacttgactatgtaaagaaaccgatacccgagactgccatggttaagatacttgagaagctatacgaagaggatgtgggagctggcatgtacgttctctacccttacggcggtataatggaagaaatttcagaatccgcaatcccattcccacacagagcaggtattatgtatgaaatctggtatactgcctcatgggagaaacaagaagataacgaaaaacacattaattgggtccgtagcgtctacaatttcactacaccatatgtatccaagaacccgagattggcttacttgaattatagagacttggatctaggaaaaaataatgaagaaagcccgaataattatacacaggcaaggatttggggcgagaagtatttcggcaagaacttcaacagattagtaaaagttaagaccaaagttgaccccaataacttttttagaaatgaacaaagtatccctccactcccaccacatcatcat

SEQ ID NO: 973 - DNA, 1551 bp, Artificial Sequence
  Synthetic
aatccccacgagaactttcttaagtgtttcagtaaacatatcccaaataacgtggcgaatccgaaattagtatacacgcaacacgatcagctatattcgagcattctgaatagtaccattcaaaacttgcgctttatatcggacacaactccaaagcctttagtcatagttactccttcaaatgtttcccatattcaggctacaatcctctgctctaaaaaagttgggttgcaaatacgtactagatcaggaggccacgatgccgaaggtatgtcttatatctcccaagtgccattcgttgtcgtcgacttgaggaacatgcattctattaagattgatgtacactcccagaccgcatgggttgaagctggtgccacattaggtgaagtatactattggataaacgagaaaaatgaaaatttatcgtttcctggaggctattgtccaactgttggtgtcggtggtcatttctcaggcgggggctacggagcattgatgcgaaactacggactagcagctgataacattatagacgcccatctcgtgaatgtggatggtaaagttcttgatagaaagagcatgggtgaagatttgttttgggcgatcagaggcggtggaggggaaaactttggtattattgcggcttggaaaataaagctggtcgacgttccctcgaaagtaacaatcttttctgtaaagaaaaatatggaaatacatgggttggtcaagttattcaataaatggcaaaacattgcttataagtatgataaagacctcgttctgatgactcattttattacgaaaaatattaccgacaatcacggtaagaataaaactacagtgcacggttacttttcttcaattttccatggtggcgttgactctctagtagatttaatgaacaaaagtttccctgagttagggatcaagaaaacggattgtaaagaattttcttggatcgacacaaccatattctattcgggtgttgttaactttaataccgcaaactttaaaaaggaaattttgttagatcgctctgctggaaagaaaacagcatttagtatcaaacttgactatgtaaagaaaccgatacccgagactgccatggttaagatacttgagaagctatacgaagaggatgtgggagctggcatgtacgttctctacccttacggcggtataatggaagaaatttcagaatccgcaatcccattcccacacagagcaggtattatgtatgaactgtggtatactgcctcatgggagaaacaagaagataacgaaaaacacattaattgggtccgtagcgtctacaatttcactacaccatatgtatccaagaacccgagattggcttacttgaattatagagacttggatctaggaaaaaataatcatgaaagcccgaataattatacacaggcaaggatttggggcgagaagtatttcggcaagaacttcaacagattagtaaaagttaagaccaaagttgaccccaataacttttttagaaatgaacaaagtatccctccactcccaccacatcatcat

SEQ ID NO: 974 - DNA, 1551 bp, Artificial Sequence
  Synthetic
aatcccagggagaactttcttaagtgtttcagtaaacatatcccaaataacgtggcgaatccgaaattagtatacacgcaaaacgatagcctatattccagcattctgaatagtaccattcaaaacttgcgctttacatcggacacaactccaaagcctttagtcatagttactccttcaaatgtttcccatattcaggctacaatcctctgctctaaaaaagttgggttgcaaatacgtactagatcaggaggccacgatgccgaaggtatgtcttatatctcccaagtgccattcgttgtcgtcgacttgaggaacatgcattctattaagattgatgtagaatcccagaccgcatgggttgaagctggtgccacattaggtgaagtatactattggataaacgagaaaaatgaaaatttatcgtttcctggaggctattgtccaactgttggtgtcggtggtcatttctcaggcgggggctacggagcattgatgcgaaactacggactagcagctgataacattatagacgcccatctcgtgaatgtggatggtaaagttcttgatagaaagagcatgggtgaagatttgttttgggcgatcagaggcggtggaggggaaaactttggtattattgcggcttggaaaataaagctggtcgatgttccctcgaaagtaacaatcttttctgtaaagaaaaatatggaaatacatgggttggtcaagttattcaataaatggcaaaacattgcttataagtatgataaagacctccttctgatgactcattttattacgaaaaatattaccgacaatcacggtaagaataaaactacagtgcacggttacttttcttcaattttccatggtggcgttgactctctagtagatttaatgaacaaaagtttccctgagttagggatcaagaaaacggattgtaaagaattgtcttggatcgacacaaccatattctattcgggtgttgttaactttaataccgcaaactttaaaaaggaaattttgttagatcgctctgctggaaagaaaacagcatttagtatcaaacttgactatgtaaagaaaccgatacccgagactgccatggttaagatacttgagaagctatacgaagaggatgtgggagctggcatgtacgttctctacccttacggcggtataatggaagaaatttcagaatccgcaatcccattcccacacagagcaggtattatgtatgaactgtggtatactgcctcatgggagaaacaagaagataacgaaaaacacattaattgggtccgtagcgtctacaatttcactacaccatatgtatccaagaacccgagattggcttacttgaattatagagacttggatctaggaaaaaataatcatgaaagcccgaataattatacacaggcaaggatttggggcgagaagtatttcggcaagaacttcaacagattagtaaaagttaagaccaaagttgaccccaataacttttttagaaatgaacaaagtatccctccactcccaccacatcatcat

SEQ ID NO: 975 - DNA, 1551 bp, Artificial Sequence
  Synthetic
aatccccaagagaactttcttaagtgtttcagtaaacatatcccaaataacgtggcgaatccgaaattagtatacacgcaaaatgattcactatattctagcattctgaatagtaccattcaaaacttgcgctttacatcggacacaactccaaagcctttagtcatagttactccttcaaatgtttcccatattcaggctacaatcctctgctctaaaaaagttgggttgcaaatacgtactagatcaggaggccacgatgccgaaggtatgtcttatatctcccaagtgccattcgttgtcgtcgacttgaggaacatgcattctattaagattgatgtagaatcccagaccgcatgggttgaagctggtgccacattaggtgaagtatactattggataaacgagaaaaatgaaaatttatcgtttcctggaggctattgtccaactgttggtgtcggtggtcatttctcaggcgggggctacggagcattgatgcgaaactacggactagcagctgataacattatagacgcccatctcgtgaatgtggatggtaaagttcttgatagaaagagcatgggtgaagatttgttttgggcgatcagaggcggtggaggggaaaactttggtattattgcggcttggaaaataaagctggtcccagttccctcgaaagtaacaatcttttctgtaaagaaaaatatggaaatacatgggttggtcaagttattcaataaatggcaaaacattgcttataagtatgataaagacctccttctgatgactcattttattacgaaaaatattaccgacaatcacggtaagaataaaactacagtgcacggttacttttcttcaattttccatggtggcgttgactctctagtagatttaatgaacaaaagtttccctgagttagggatcaagaaaacggattgtaaagaattttcttggatcgacacaaccatattctattcgggtgttgttaactttaataccgcaaactttaaaaaggaaattttgttagatcgctctgctggaaagaaaacagcatttagtatcaaacttgactatgtaaagaaaccgatacccgagactgccatggttaagatacttgagaagctatacgaagaggatgtgggagctggcatgtacgttctctacccttacggcggtataatggaagaaatttcagaatccgcaatcccattcccacacagagcaggtattatgtatgaactgtggtatactgcctcatgggagaaacaagaagataacgaaaaacacattaattgggtccgtagcgtctacaatttcactacaccatatgtatccaagaacccgagattggcttacttgaattatagagacttggatctaggaaaaaataatgaggaaagcccgaataattatacacaggcaaggatttggggcgagaagtatttcggcaagaacttcaacagattagtaaaagttaagaccaaagttgaccccaataacttttttagaaatgaacaaagtatccctccactcccaccacatcatcat

SEQ ID NO: 976 - DNA, 1551 bp, Artificial Sequence
  Synthetic
aatccccaggagaactttcttaagtgtttcagtaaacatatcccaaataacgtggcgaatccgaaattagtatacacgcaaaacgatcagctatatatgagcattctgaatagtaccattcaaaacttgcgctttacatcggacacaactccaaagcctttagtcatagttactccttcacacgtttcccatattcaggctacaatcctctgctctaaaaaagttgggttgcaaatacgtactagatcaggaggccacgatgccgaaggtatgtcttatatctcccaagtgccattcgttgtcgtcgacttgaggaacatgcattctattaagattgatgtacactcccagaccgcatgggttgaagctggtgccacattaggtgaagtatactattggataaacgagaaaaatgaaaatttatcgtttcctggaggctattgtccaactgttggtgtcggtggtcatttctcaggcgggggctacggagcattgatgcgaaagtacggactagcagctgataacattatagacgcccatctcgtggatgtggatggtaaagttcttgatagaaagagcatgggtgaagatttgttttgggcgatcagaggcggtggaggggaaaactttggtattattgcggcttggaaaataaagctggtcccggttccctcgaaagtaacaatcttttctgtaaagaaaaatatggaaatacatgggttggtcaagttattcaataaatggcaaaacattgcttataagtatgataaagacctcgttctgatgactcattttattacgaaaaatattaccgacaatcacggtaagaataaaactacagtgcacggttacttttcttcaattttccatggtggcgttgactctctagtagatttaatgaacaaaagtttccctgagttagggatcaagaaaacggattgtaaagaaatgtcttggatcgacacaaccatattctattcgggtgttgttaactttaataccgcaaactttaaaaaggaaattttgttagatcgctctgctggaaagaaaacagcatttaaaatcaaacttgactatgtaaagaaaccgatacccgagactgccatggttaagatacttgagaagctatacgaagaggatgtgggagctggcatgtacgttctctacccttacggcggtataatggaagaaatttcagaatccgcaatcccattcccacacagagcaggtattatgtatgaaatatggtatactgcctcatgggagaaacaagaagataacgaaaaacacattaattgggtccgtagcgtctacaatttcactacaccatatgtatccaagaacccgagattggcttacttgaattatagagacttggatctaggaaaaaataatgaagagagcccgaataattatacacaggcaaggatttggggcgagaagtatttcggcaagaacttcaacagattagtaaaagttaagaccaaagttgaccccaataacttttttagaaatgaacaaagtatccctccactcccaccacatcatcat

SEQ ID NO: 977 - DNA, 1551 bp, Artificial Sequence
  Synthetic
aatccccaagagaactttcttaagtgtttcagtaaacatatcccaaataacgtggcgaatccgaaattagtatacacgcaaaatgatcagctatattcaagcattctgaatagtaccattcaaaacttgcgctttacatcggacacaactccaaagcctttagtcatagttactccttcacacgtttcccatattcaggctacaatcctctgcgcaaaaaaagttgggttgcaaatacgtactagatcaggaggccacgatgccgaaggtatgtcttatatctcccaagtgccattcgttgtcgtcgacttgaggaacatgcattctattaagattgatgtacactcccagaccgcatgggttcaagctggtgccacattaggtgaagtatactattggataaacgagaaaaatgaaaatttatcgtttcctggaggctattgtccaactgttggtgtcggtggtcatttctcaggcgggggctacggagcattgatgcgaaaatacggactagcagctgataacattatagacgcccatctcgtggatgtggatggtaaagttcttgatagaaagagcatgggtgaagatttgttttgggcgatcagaggcggtggaggggaaaactttggtattattgcggcttggaaaataaagctggtccctgttccctcgaaagtaacaaggttttctgtaaagaaaaatatggaaatacatgggttggtcaagttattcaataaatggcaaaacattgcttataagtatgataaagacctcatgctgatgactcattttattacgaaaaatattaccgacaatcacggtaagaataaaactacagtgcacggttacttttcttcaattttccatggtggcgttgactctctagtagatttaatgaacaaaagtttccctgagttagggatcaagaaaacggattgtaaagaaatgtcttggatcgacacaaccatattctattcgggtgttgttaactttaataccgcaaactttaaaaaggaaattttgttagatcgctctgctggaaagaaaacagcatttaagatcaaacttgactatgtaaagaaaccgatacccgagactgccatggttaagatacttgagaagctatacgaagaggatgtgggagctggcatgtacgttctctacccttacggcggtataatggaagaaatttcagaatccgcaatcccattcccacacagagcaggtattatgtatgaaatatggtatactgcctcatgggagaaacaagaagataacgaaaaacacattaattgggtccgtagcgtctacaatttcactacaccatatgtatccaaaaacccgagattggcttacttgaattatagagacttggatctaggaaaaaataatgaagaaagcccgaataattatacacaggcaaggatttggggcgagaagtatttcggcaagaacttcaacagattagtaaaagttaagaccaaagttgaccccaataacttttttagaaatgaacaaagtatccctccactcccaccacatcatcat

SEQ ID NO: 978 - DNA, 1551 bp, Artificial Sequence
  Synthetic
aatccccaggagaactttcttaagtgtttcagtaaacatatcccaaataacgtggcgaatccgaaattagtatacacgcaaaatgatcagctatatagcagcattctgaatagtaccattcaaaacttgcgctttacttcggacacaactccaaagcctttagtcatagttactccttcacacgtatcccatattcaggctacaatcctctgcgcaaaaaaagttgggttgcaaatacgtactagatcaggaggccacgatgccgaaggtatgtcttatatctcccaagtgccattcgttgtcgtcgacttgaggaacatgcattctattaagattgatgtacactcccagaccgcatgggttcaagctggtgccacattaggtgaagtatactattggataaacgagaaaaatgaaaatttatcgtttcctggaggctattgtccaactgttggtgtcggtggtcatttctcaggcgggggctacggagcattgatgcgaaagtacggactagcagctgataacattatagacgcccatctcgtggatgtggatggtaaagttcttgatagaaagagcatgggtgaagatttgttttgggcgatcagaggcggtggaggggaaaactttggtattattgcggcttggaaaataaagctggtcccggttccctcgaaagttacaatcttttctgtaaagaaaaatatggaaatacatgggttggtcaagttattcaataaatggcaaaacattgcttataagtatgataaagacctcatgctgatgactcattttattacgaaaaatattaccgacaatcacggtaagaataaaactacagtgcacggttacttttcttcaattttccatggtggcgttgactctctagtagatttaatgaacaaaagtttccctgagttagggatcaagaaaacggattgtaaagaaatgtcttggatcgacacaaccatattctattcgggtgttgttaactttaataccgcaaactttaaaaaggaaattttgttagatcgctctgctggaaagaaaacagcatttaaaatcaaacttgactatgtaaagaaaccgatacccgagactgccatggttaagatacttgagaagctatacgaagaggatgtgggagctggcatgtacgttctctacccttacggcggtataatggaagaaatttcagaatccgcaatcccattcccacacagagcaggtattatgtatgaaatatggtatactgcctcatgggagaaacaagaagataacgaaaaacacattaattgggtccgtagcgtctacaatttcactacaccatatgtatccaagaacccgagattggcttacttgaattatagagacttggatctaggaaaaaataacgaagaaagcccgaataattatacacaggcaaggatttggggcgagaagtatttcggcaagaacttcaacagattagtaaaagttaagaccaaagttgaccccaataacttttttagaaatgaacaaagtatccctccactcccaccacatcatcat

SEQ ID NO: 979 - DNA, 1551 bp, Artificial Sequence
  Synthetic
aatccccaagagaactttcttaagtgtttcagtaaacatatcccaaataacgtggcgaatccgaaattagtatacacgcaaaacgatcagctatatatgagcattctgaatagtaccattcaaaacttgcgctttacatcggacacaactccaaagcctttagtcatagttactccttcaaatgtttcccatattcaggctacaatcctctgctctaaaaaagttgggttgcaaatacgtactagatcaggaggccacgatgccgaaggtatgtcttatatctcccaagtgccattcgttgtcgtcgacttgaggaacatgcattctattaagattgatgtacactcccagaccgcatgggttgaagctggtgccacattaggtgaagtatactattggataaacgagaaaaatgaaaatttatcgtttcctggaggctattgtccaactgttggtgtcggtggtcatttctcaggcgggggctacggagcattgatgcgaaactacggactagcagctgataacattatagacgcccatctcgtgaatgtggatggtaaagttcttgatagaaagagcatgggtgaagatttgttttgggcgatcagaggcggtggaggggaaaactttggtattattgcggcttggaaaataaagctggtcccagttccctcgaaagtaacaatcttttctgtaaagaaaaatatggaaatacatgggttggtcaagttattcaataaatggcaaaacattgcttataagtatgataaagacctcttgctgatgactcattttattacgaaaaatattaccgacaatcacggtaagaataaaactacagtgcacggttacttttcttcaattttccatggtggcgttgactctctagtagatttaatgaacaaaagtttccctgagttagggatcaagaaaacggattgtaaagaattttcttggatcgacacaaccatattctattcgggtgttgttaactttaataccgcaaactttaaaaaggaaattttgttagatcgctctgctggaaagaaaacagcatttagtatcaaacttgactatgtaaagaaaccgatacccgagactgccatggttaagatacttgagaagctatacgaagaggatgtgggagctggcatgtacgttctctacccttacggcggtataatggaagaaatttcagaatccgcaatcccattcccacacagagcaggtattatgtatgaactgtggtatactgcctcatgggagaaacaagaagataacgaaaaacacattaattgggtccgtagcgtctacaatttcactacaccatatgtatccaaaaacccgagattggcttacttgaattatagagacttggatctaggaaaaaataatgaagaaagcccgaataattatacacaggcaaggatttggggcgagaagtatttcggcaagaacttcaacagattagtaaaagttaagaccaaagttgaccccaataacttttttagaaatgaacaaagtatccctccactcccaccacatcatcat

SEQ ID NO: 980 - DNA, 1551 bp, Artificial Sequence
  Synthetic
aatccccaagagaactttcttaagtgtttcagtaaacatatcccaaataacgtgaccaatccgaaattagtatacacgcaaaacgattcgctatattccagcattctgaatagtaccattcaaaacttgcgctttacatcggacacaactccaaagcctttagtcatagttactccttcaaatgtttcccatattcaggctacaatcctctgctctaaaaaagttgggttgcaaatacgtactagatcaggaggccacgatgccgaaggtatgtcttatatctcccaagtgccattcgttgtcgtcgacttgaggaacatgcattctattaagattgatgtagaatcccagaccgcatgggttgaagctggtgccacattaggtgaagtatactattggataaacgagaaaaatgaaaatttatcgtttcctggaggctattgtccaactgttggtgtcggtggtcatttctcaggcgggggctacggagcattgatgcgaaactacggactagcagctgataacattatagacgcccatctcgtgaatgtggatggtaaagttcttgatagaaagagcatgggtgaagatttgttttgggcgatcagaggcggtggaggggaaaactttggtattattgcggcttggaaaataaagctggtcccggttccctcgaaagttacaatcttttctgtaaagaaaaatatggaaatacatgggttggtcaagttattcaataaatggcaaaacattgcttataagtatgataaagacctcctgctgatgactcattttattacgaaaaatattaccgacaatcacggtaagaataaaactacagtgcacggttacttttcttcaattttccatggtggcgttgactctctagtagatttaatgaacaaaagtttccctgagttagggatcaagaaagaggattgtaaagaactttcttggatcgacacaaccatattctattcgggtgttgttaactttaataccgcaaactttaaaaaggaaattttgttagatcgctctgctggaaagaaaacagcatttagtatcaaacttgactatgtaaagaaaccgatacccgagactgccatggttaagatacttgagaagctatacgaagaggatgtgggagctggcatgtacgttctctacccttacggcggtataatggatgaaatttcagaatccgcaatcccattcccacacagagcaggtattatgtatgaactgtggtatactgcctcatgggagaaacaagaagataacgaaaaacacattaattgggtccgtagcgtctacaatttcactacaccatatgtatccaaaaacccgagattggcttacttgaattatagagacttggatctaggaaaaaataatgaggaaagcccgaataattatacacaggcaaggatttggggcgagaagtatttcggcaagaacttcaacagattagtaaaagttaagaccaaagttgaccccaataacttttttagaaatgaacaaagtatccctccactcccaccacatcatcat

SEQ ID NO: 981 - DNA, 1551 bp, Artificial Sequence
  Synthetic
aatcccagggagaactttcttaagtgtttcagtaaacatatcccaaataacgtgacaaatccgaaattagtatacacgcaaaacgattctctatattccagcattctgaatagtaccattcaaaacttgcgctttacatcggacacaactccaaagcctttagtcatagttactccttcaaatgtttcccatattcaggctacaatcctctgctctaaaaaagttgggttgcaaatacgtactagatcaggaggccacgatgccgaaggtatgtcttatatctcccaagtgccattcgttgtcgtcgacttgaggaacatgcattctattaagattgatgtacactcccagaccgcatgggttgaagctggtgccacattaggtgaagtatactattggataaacgagaaaaatgaaaatttatcgtttcctggaggctattgtccaactgttggtgtcggtggtcatttctcaggcgggggctacggagcattgatgcgaaactacggactagcagctgataacattatagacgcccatctcgtgaatgtggatggtaaagttcttgatagaaagagcatgggtgaagatttgttttgggcgatcagaggcggtggaggggaaaactttggtattattgcggcttggaaaataaagctggtcgatgttccctcgaaagtaacaatcttttctgtaaagaaaaatatggaaatacatgggttggtcaagttattcaataaatggcaaaacattgcttataagtatgataaagacctcctgctgatgactcattttattacgaaaaatattaccgacaatcacggtaagaataaaactacagtgcacggttacttttcttcaattttccatggtggcgttgactctctagtagatttaatgaacaaaagtttccctgagttagggatcaagaaagaagattgtaaagaactctcttggatcgacacaaccatattctattcgggtgttgttaactttaataccgcaaactttaaaaaggaaattttgttagatcgctctgctggaaagaaaacagcatttagtatcaaacttgactatgtaaagaaaccgatacccgagactgccatggttaagatacttgagaagctatacgaagaggatgtgggagctggcatgtacgttctctacccttacggcggtataatggaagaaatttcagaatccgcaatcccattcccacacagagcaggtattatgtatgaactgtggtatactgcctcatgggagaaacaagaagataacgaaaaacacattaattgggtccgtagcgtctacaatttcactacaccatatgtatccaagaacccgagattggcttacttgaattatagagacttggatctaggaaaaaataatgaagagagcccgaataattatacacaggcaaggatttggggcgagaagtatttcggcaagaacttcaacagattagtaaaagttaagaccaaagttgaccccaataacttttttagaaatgaacaaagtatccctccactcccaccacatcatcat

SEQ ID NO: 982 - DNA, 1551 bp, Artificial Sequence
  Synthetic
aatcccagggagaactttcttaagtgtttcagtaaacatatcccaaataacgtgaccaatccgaaattagtatacacgcaaaacgatagcctatattcaagcattctgaatagtaccattcaaaacttgcgctttacatcggacacaactccaaagcctttagtcatagttactccttcaaatgtttcccatattcaggctacaatcctctgctctaaaaaagttgggttgcaaatacgtactagatcaggaggccacgatgccgaaggtatgtcttatatctcccaagtgccattcgttgtcgtcgacttgaggaacatgcattctattaagattgatgtacactcccagaccgcatgggttgaagctggtgccacattaggtgaagtatactattggataaacgagaaaaatgaaaatttatcgtttcctggaggctattgtccaactgttggtgtcggtggtcatttctcaggcgggggctacggagcattgatgcgaaactacggactagcagctgataacattatagacgcccatctcgtgaatgtggatggtaaagttcttgatagaaagagcatgggtgaagatttgttttgggcgatcagaggcggtggaggggaaaactttggtattattgcggcttggaaaataaagctggtcgacgttccctcgaaagtaacaatcttttctgtaaagaaaaatatggaaatacatgggttggtcaagttattcaataaatggcaaaacattgcttataagtatgataaagacctcgttctgatgactcattttattacgaaaaatattaccgacaatcacggtaagaataaaactacagtgcacggttacttttcttcaattttccatggtggcgttgactctctagtagatttaatgaacaaaagtttccctgagttagggatcaagaaaacggattgtaaagaattatcttggatcgacacaaccatattctattcgggtgttgttaactttaataccgcaaactttaaaaaggaaattttgttagatcgctctgctggaaagaaaacagcatttagtatcaaacttgactatgtaaagaaaccgatacccgagactgccatggttaagatacttgagaagctatacgaagaggatgtgggagctggcatgtacgttctctacccttacggcggtataatggatgaaatttcagaatccgcaatcccattcccacacagagcaggtattatgtatgaactgtggtatactgcctcatgggagaaacaagaagataacgaaaaacacattaattgggtccgtagcgtctacaatttcactacaccatatgtatccaagaacccgagattggcttacttgaattatagagacttggatctaggaaaaaataatgaagagagcccgaataattatacacaggcaaggatttggggcgagaagtatttcggcaagaacttcaacagattagtaaaagttaagaccaaagttgaccccaataacttttttagaaatgaacaaagtatccctccactcccaccacatcatcat

SEQ ID NO: 983 - DNA, 1551 bp, Artificial Sequence
  Synthetic
aatccccaggagaactttcttaagtgtttcagtaaacatatcccaaataacgtggcgaatccgaaattagtatacacgcaaaacgatagcctatattcgagcattctgaatagtaccattcaaaacttgcgctttacatcggacacaactccaaagcctttagtcatagttactccttcaaatgtttcccatattcaggctacaatcctctgctctaaaaaagttgggttgcaaatacgtactagatcaggaggccacgatgccgaaggtatgtcttatatctcccaagtgccattcgttattgtcgacttgaggaacatgcattctattaagattgatgtagaatcccagaccgcatgggttgaagctggtgccacattaggtgaagtatactattggataaacgagaaaaatgaaaatttatcgtttcctggaggctattgtccaactgttggtgtcggtggtcatttctcaggcgggggctacggagcattgatgcgaaactacggactagcagctgataacattatagacgcccatctcgtgaatgtggatggtaaagttcttgatagaaagagcatgggtgaagatttgttttgggcgatcagaggcggtggaggggaaaactttggtattattgcggcttggaaaataaagctggtccccgttccctcgaaagttacaatcttttctgtaaagaaaaatatggaaatacatgggttggtcaagttattcaataaatggcaaaacattgcttataagtatgataaagacctcttgctgatgactcattttattacgaaaaatattaccgacaatcacggtaagaataaaactacagtgcacggttacttttcttcaattttccatggtggcgttgactctctagtagatttaatgaacaaaagtttccctgagttagggatcaagaaaacggattgtaaagaactatcttggatcgacacaaccatattctattcgggtgttgttaactttaataccgcaaactttaaaaaggaaattttgttagatcgctctgctggaaagaaaacagcatttagtatcaaacttgactatgtaaagaaaccgatacccgagactgccatggttaagatacttgagaagctatacgaagaggatgtgggagctggcatgtacgttctctacccttacggcggtataatggatgaaatttcagaatccgcaatcccattcccacacagagcaggtattatgtatgaactgtggtatactgcctcatgggagaaacaagaagataacgaaaaacacattaattgggtccgtagcgtctacaatttcactacaccatatgtatccaagaacccgagattggcttacttgaattatagagacttggatctaggaaaaaataatgaagagagcccgaataattatacacaggcaaggatttggggcgagaagtatttcggcaagaacttcaacagattagtaaaagttaagaccaaagttgaccccaataacttttttagaaatgaacaaagtatccctccactcccaccacatcatcat

SEQ ID NO: 984 - DNA, 1551 bp, Artificial Sequence
  Synthetic
aatccccaggagaactttcttaagtgtttcagtaaacatatcccaaataacgtggcgaatccgaaattagtatacacgcaaaacgatcagctatattctagcattctgaatagtaccattcaaaacttgcgctttacatcggacacaactccaaagcctttagtcatagttactccttcacacgtttcccatattcaggctacaatcctctgcgccaaaaaagttgggttgcaaatacgtactagatcaggaggccacgatgccgaaggtatgtcttatatctcccaagtgccattcgttgtcgtcgacttgaggaacatgcattctattaagattgatgtacactcccagaccgcatgggttgaagctggtgccacattaggtgaagtatactattggataaacgagaaaaatgaaaatttatcgtttcctggaggctattgtccaactgttggtgtcggtggtcatttctcaggcgggggctacggagcattgatgcgaaaatacggactagcagctgataacattatagacgcccatctcgtggatgtggatggtaaagttcttgatagaaagagcatgggtgaagatttgttttgggcgatcagaggcggtggaggggaaaactttggtattattgcggcttggaaaataaagctggtcccggttccctcgaaagtaacaatcttttctgtaaagaaaaatatggaaatacatgggttggtcaagttattcaataaatggcaaaacattgcttataagtatgataaagacctcatgctgatgactcattttattacgaaaaatattaccgacaatcacggtaagaataaaactacagtgcacggttacttttcttcaattttccatggtggcgttgactctctagtagatttaatgaacaaaagtttccctgagttagggatcaagaaaacggattgtaaagaaatgtcttggatcgacacaaccatattctattcgggtgttgttaactttaataccgcaaactttaaaaaggaaattttgttagatcgctctgctggaaagaaaacagcatttaagatcaaacttgactatgtaaagaaaccgatacccgagactgccatggttaagatacttgagaagctatacgaagaggatgtgggagctggcatgtacgttctctacccttacggcggtataatggaagaaatttcagaatccgcaatcccattcccacacagagcaggtattatgtatgaaatttggtatactgcctcatgggagaaacaagaagataacgaaaaacacattaattgggtccgtagcgtctacaatttcactacaccatatgtatccaaaaacccgagattggcttacttgaattatagagacttggatctaggaaaaaataatgaggaaagcccgaataattatacacaggcaaggatttggggcgagaagtatttcggcaagaacttcaacagattagtaaaagttaagaccaaagttgaccccaataacttttttagaaatgaacaaagtatccctccactcccaccacatcatcat

SEQ ID NO: 985 - DNA, 1551 bp, Artificial Sequence
  Synthetic
aatccccaggagaactttcttaagtgtttcagtaaacatatcccaaataacgtggcgaatccgaaattagtatacacgcaaaacgattctctatattcaagcattctgaatagtaccattcaaaacttgcgctttacatcggacacaactccaaagcctttagtcatagttactccttcaaatgtttcccatattcaggctacaatcctctgctctaaaaaagttgggttgcaaatacgtactagatcaggaggccacgatgccgaaggtatgtcttatatctcccaagtgccattcgttattgtcgacttgaggaacatgcattctattaagattgatgtagaatcccagaccgcatgggttgaagctggtgccacattaggtgaagtatactattggataaacgagaaaaatgaaaatttatcgtttcctggaggctattgtccaactgttggtgtcggtggtcatttctcaggcgggggctacggagcattgatgcgaaactacggactagcagctgataacattatagacgcccatctcgtgaatgtggatggtaaagttcttgatagaaagagcatgggtgaagatttgttttgggcgatcagaggcggtggaggggaaaactttggtattattgcggcttggaaaataaagctggtcccggttccctcgaaagtaacaatcttttctgtaaagaaaaatatggaaatacatgggttggtcaagttattcaataaatggcaaaacattgcttataagtatgataaagacctcctactgatgactcattttattacgaaaaatattaccgacaatcacggtaagaataaaactacagtgcacggttacttttcttcaattttccatggtggcgttgactctctagtagatttaatgaacaaaagtttccctgagttagggatcaagaaagaggattgtaaagaattatcttggatcgacacaaccatattctattcgggtgttgttaactttaataccgcaaactttaaaaaggaaattttgttagatcgctctgctggaaagaaaacagcatttagtatcaaacttgactatgtaaagaaaccgatacccgagactgccatggttaagatacttgagaagctatacgaagaggatgtgggagctggcatgtacgttctctacccttacggcggtataatggaagaaatttcagaatccgcaatcccattcccacacagagcaggtattatgtatgaactgtggtatactgcctcatgggagaaacaagaagataacgaaaaacacattaattgggtccgtagcgtctacaatttcactacaccatatgtatccaagaacccgagattggcttacttgaattatagagacttggatctaggaaaaaacaatgaagaaagcccgaataattatacacaggcaaggatttggggcgagaagtatttcggcaagaacttcaacagattagtaaaagttaagaccaaagttgaccccaataacttttttagaaatgaacaaagtatccctccactcccaccacatcatcat

SEQ ID NO: 986 - DNA, 1551 bp, Artificial Sequence
  Synthetic
aatcccagggagaactttcttaagtgtttcagtaaacatatcccaaataacgtggcgaatccgaaattagtatacacgcaaaacgattcactatattctagcattctgaatagtaccattcaaaacttgcgctttacttcggacacaactccaaagcctttagtcatagttactccttcaaatgtttcccatattcaggctacaatcctctgctctaaaaaagttgggttgcaaatacgtactagatcaggaggccacgatgccgaaggtatgtcttatatctcccaagtgccattcgttgtcgtcgacttgaggaacatgcattctattaagattgatgtacactcccagaccgcatgggttgaagctggtgccacattaggtgaagtatactattggataaacgagaaaaatgaaaatttatcgtttcctggaggctattgtccaactgttggtgtcggtggtcatttctcaggcgggggctacggagcattgatgcgaaactacggactagcagctgataacattatagacgcccatctcgtgaatgtggatggtaaagttcttgatagaaagagcatgggtgaagatttgttttgggcgatcagaggcggtggaggggaaaactttggtattattgcggcttggaaaataaagctggtcgacgttccctcgaaagtaacaatcttttctgtaaagaaaaatatggaaatacatgggttggtcaagttattcaataaatggcaaaacattgcttataagtatgataaagacctccttctgatgactcattttattacgaaaaatattaccgacaatcacggtaagaataaaactacagtgcacggttacttttcttcaattttccatggtggcgttgactctctagtagatttaatgaacaaaagtttccctgagttagggatcaagaaaacggattgtaaagaattttcttggatcgacacaaccatattctattcgggtgttgttaactttaataccgcaaactttaaaaaggaaattttgttagatcgctctgctggaaagaaaacagcatttagtatcaaacttgactatgtaaagaaaccgatacccgagactgccatggttaagatacttgagaagctatacgaagaggatgtgggagctggcatgtacgttctctacccttacggcggtataatggaagaaatttcagaatccgcaatcccattcccacacagagcaggtattatgtatgaactgtggtatactgcctcatgggagaaacaagaagataacgaaaaacacattaattgggtccgtagcgtctacaatttcactacaccatatgtatccaaaaacccgagattggcttacttgaattatagagacttggatctaggaaaaaataatgaagagagcccgaataattatacacaggcaaggatttggggcgagaagtatttcggcaagaacttcaacagattagtaaaagttaagaccaaagttgaccccaataacttttttagaaatgaacaaagtatccctccactcccaccacatcatcat

SEQ ID NO: 987 - DNA, 1551 bp, Artificial Sequence
  Synthetic
aatcccagggagaactttcttaagtgtttcagtaaacatatcccaaataacgtggcgaatccgaaattagtatacacgcaaaacgatcagctatattctagcattctgaatagtaccattcaaaacttgcgctttacatcggacacaactccaaagcctttagtcatagttactccttcaaatgtgtcccatattcaggctacaatcctctgctctaaaaaagttgggttgcaaatacgtactagatcaggaggccacgatgccgaaggtatgtcttatatctcccaagtgccattcgttgtcgtcgacttgaggaacatgcattctattaagattgatgtagaatcccagaccgcatgggttgaagctggtgccacattaggtgaagtatactattggataaacgagaaaaatgaaaatttatcgtttcctggaggctattgtccaactgttggtgtcggtggtcatttctcaggcgggggctacggagcattgatgcgaaactacggactagcagctgataacattatagacgcccatctcgtgaatgtggatggtaaagttcttgatagaaagagcatgggtgaagatttgttttgggcgatcagaggcggtggaggggaaaactttggtattattgcggcttggaaaataaagctggtcgacgttccctcgaaagttacaatcttttctgtaaagaaaaatatggaaatacatgggttggtcaagttattcaataaatggcaaaacattgcttataagtatgataaagacctcctactgatgactcattttattacgaaaaatattaccgacaatcacggtaagaataaaactacagtgcacggttacttttcttcaattttccatggtggcgttgactctctagtagatttaatgaacaaaagtttccctgagttagggatcaagaaaacggattgtaaagaactgtcttggatcgacacaaccatattctattcgggtgttgttaactttaataccgcaaactttaaaaaggaaattttgttagatcgctctgctggaaagaaaacagcatttagtatcaaacttgactatgtaaagaaaccgatacccgagactgccatggttaagatacttgagaagctatacgaagaggatgtgggagctggcatgtacgttctctacccttacggcggtataatggaagaaatttcagaatccgcaatcccattcccacacagagcaggtattatgtatgaactgtggtatactgcctcatgggagaaacaagaagataacgaaaaacacattaattgggtccgtagcgtctacaatttcactacaccatatgtatccaagaacccgagattggcttacttgaattatagagacttggatctaggaaaaaataatgaggagagcccgaataattatacacaggcaaggatttggggcgagaagtatttcggcaagaacttcaacagattagtaaaagttaagaccaaagttgaccccaataacttttttagaaatgaacaaagtatccctccactcccaccacatcatcat

SEQ ID NO: 988 - DNA, 1551 bp, Artificial Sequence
  Synthetic
aatccccaagagaactttcttaagtgtttcagtaaacatatcccaaataacgtggcgaatccgaaattagtatacacgcaaaacgattcactatattctagcattctgaatagtaccattcaaaacttgcgctttacatcggacacaactccaaagcctttagtcatagttactccttcaaatgtttcccatattcaggctacaatcctctgctctaaaaaagttgggttgcaaatacgtactagatcaggaggccacgatgccgaaggtatgtcttatatctcccaagtgccattcgttgtcgtcgacttgaggaacatgcattctattaagattgatgtagaatcccagaccgcatgggttgaagctggtgccacattaggtgaagtatactattggataaacgagaaaaatgaaaatttatcgtttcctggaggctattgtccaactgttggtgtcggtggtcatttctcaggcgggggctacggagcattgatgcgaaactacggactagcagctgataacattatagacgcccatctcgtgaatgtggatggtaaagttcttgatagaaagagcatgggtgaagatttgttttgggcgatcagaggcggtggaggggaaaactttggtattattgcggcttggaaaataaagctggtccccgttccctcgaaagtaacaatcttttctgtaaagaaaaatatggaaatacatgggttggtcaagttattcaataaatggcaaaacattgcttataagtatgataaagacctcttactgatgactcattttattacgaaaaatattaccgacaatcacggtaagaataaaactacagtgcacggttacttttcttcaattttccatggtggcgttgactctctagtagatttaatgaacaaaagtttccctgagttagggatcaagaaaacggattgtaaagaattatcttggatcgacacaaccatattctattcgggtgttgttaactttaataccgcaaactttaaaaaggaaattttgttagatcgctctgctggaaagaaaacagcatttagtatcaaacttgactatgtaaagaaaccgatacccgagactgccatggttaagatacttgagaagctatacgaagaggatgtgggagctggcatgtacgttctctacccttacggcggtataatggatgaaatttcagaatccgcaatcccattcccacacagagcaggtattatgtatgaactgtggtatactgcctcatgggagaaacaagaagataacgaaaaacacattaattgggtccgtagcgtctacaatttcactacaccatatgtatccaagaacccgagattggcttacttgaattatagagacttggatctaggaaaaaataatgaggaaagcccgaataattatacacaggcaaggatttggggcgagaagtatttcggcaagaacttcaacagattagtaaaagttaagaccaaagttgaccccaataacttttttagaaatgaacaaagtatccctccactcccaccacatcatcat

SEQ ID NO: 989 - DNA, 1551 bp, Artificial Sequence
  Synthetic
aatccccaagagaactttcttaagtgtttcagtaaacatatcccaaataacgtgacgaatccgaaattagtatacacgcaaaacgattcgctatattctagcattctgaatagtaccattcaaaacttgcgctttacatcggacacaactccaaagcctttagtcatagttactccttcaaatgtttcccatattcaggctacaatcctctgctctaaaaaagttgggttgcaaatacgtactagatcaggaggccacgatgccgaaggtatgtcttatatctcccaagtgccattcgttgtcgtcgacttgaggaacatgcattctattaagattgatgtacactcccagaccgcatgggttgaagctggtgccacattaggtgaagtatactattggataaacgagaaaaatgaaaatttatcgtttcctggaggctattgtccaactgttggtgtcggtggtcatttctcaggcgggggctacggagcattgatgcgaaactacggactagcagctgataacattatagacgcccatctcgtgaatgtggatggtaaagttcttgatagaaagagcatgggtgaagatttgttttgggcgatcagaggcggtggaggggaaaactttggtattattgcggcttggaaaataaagctggtccctgttccctcgaaagtaacaatcttttctgtaaagaaaaatatggaaatacatgggttggtcaagttattcaataaatggcaaaacattgcttataagtatgataaagacctccttctgatgactcattttattacgaaaaatattaccgacaatcacggtaagaataaaactacagtgcacggttacttttcttcaattttccatggtggcgttgactctctagtagatttaatgaacaaaagtttccctgagttagggatcaagaaagaagattgtaaagaactatcttggatcgacacaaccatattctattcgggtgttgttaactttaataccgcaaactttaaaaaggaaattttgttagatcgctctgctggaaagaaaacagcatttagtatcaaacttgactatgtaaagaaaccgatacccgagactgccatggttaagatacttgagaagctatacgaagaggatgtgggagctggcatgtacgttctctacccttacggcggtataatggaagaaatttcagaatccgcaatcccattcccacacagagcaggtattatgtatgaactgtggtatactgcctcatgggagaaacaagaagataacgaaaaacacattaattgggtccgtagcgtctacaatttcactacaccatatgtatccaaaaacccgagattggcttacttgaattatagagacttggatctaggaaaaaataatgaagaaagcccgaataattatacacaggcaaggatttggggcgagaagtatttcggcaagaacttcaacagattagtaaaagttaagaccaaagttgaccccaataacttttttagaaatgaacaaagtatccctccactcccaccacatcatcat

SEQ ID NO: 990 - DNA, 1551 bp, Artificial Sequence
  Synthetic
aatccccaggagaactttcttaagtgtttcagtaaacatatcccaaataacgtgaccaatccgaaattagtatacacgcaaaacgattccctatattcgagcattctgaatagtaccattcaaaacttgcgctttacatcggacacaactccaaagcctttagtcatagttactccttcaaatgtttcccatattcaggctacaatcctctgctctaaaaaagttgggttgcaaatacgtactagatcaggaggccacgatgccgaaggtatgtcttatatctcccaagtgccattcgttgtcgtcgacttgaggaacatgcattctattaagattgatgtagaatcccagaccgcatgggttgaagctggtgccacattaggtgaagtatactattggataaacgagaaaaatgaaaatttatcgtttcctggaggctattgtccaactgttggtgtcggtggtcatttctcaggcgggggctacggagcattgatgcgaaactacggactagcagctgataacattatagacgcccatctcgtgaatgtggatggtaaagttcttgatagaaagagcatgggtgaagatttgttttgggcgatcagaggcggtggaggggaaaactttggtattattgcggcttggaaaataaagctggtccccgttccctcgaaagtaacaatcttttctgtaaagaaaaatatggaaatacatgggttggtcaagttattcaataaatggcaaaacattgcttataagtatgataaagacctcctgctgatgactcattttattacgaaaaatattaccgacaatcacggtaagaataaaactacagtgcacggttacttttcttcaattttccatggtggcgttgactctctagtagatttaatgaacaaaagtttccctgagttagggatcaagaaagaagattgtaaagaactatcttggatcgacacaaccatattctattcgggtgttgttaactttaataccgcaaactttaaaaaggaaattttgttagatcgctctgctggaaagaaaacagcatttagtatcaaacttgactatgtaaagaaaccgatacccgagactgccatggttaagatacttgagaagctatacgaagaggatgtgggagctggcatgtacgttctctacccttacggcggtataatggaagaaatttcagaatccgcaatcccattcccacacagagcaggtattatgtatgaactgtggtatactgcctcatgggagaaacaagaagataacgaaaaacacattaattgggtccgtagcgtctacaatttcactacaccatatgtatccaagaacccgagattggcttacttgaattatagagacttggatctaggaaaaaataatgaggagagcccgaataattatacacaggcaaggatttggggcgagaagtatttcggcaagaacttcaacagattagtaaaagttaagaccaaagttgaccccaataacttttttagaaatgaacaaagtatccctccactcccaccacatcatcat

SEQ ID NO: 991 - DNA, 1551 bp, Artificial Sequence
  Synthetic
aatccccaggagaactttcttaagtgtttcagtaaacatatcccaaataacgtggcgaatccgaaattagtatacacgcaaaacgatcagctatattctagcattctgaatagtaccattcaaaacttgcgctttacatcggacacaactccaaagcctttagtcatagttactccttcaaatgtttcccatattcaggctacaatcctctgctctaaaaaagttgggttgcaaatacgtactagatcaggaggccacgatgccgaaggtatgtcttatatctcccaagtgccattcgttgtcgtcgacttgaggaacatgcattctattaagattgatgtacactcccagaccgcatgggttgaagctggtgccacattaggtgaagtatactattggataaacgagaaaaatgaaaatttatcgtttcctggaggctattgtccaactgttggtgtcggtggtcatttctcaggcgggggctacggagcattgatgcgaaactacggactagcagctgataacattatagacgcccatctcgtgaatgtggatggtaaagttcttgatagaaagagcatgggtgaagatttgttttgggcgatcagaggcggtggaggggaaaactttggtattattgcggcttggaaaataaagctggtccctgttccctcgaaagtcacaatcttttctgtaaagaaaaatatggaaatacatgggttggtcaagttattcaataaatggcaaaacattgcttataagtatgataaagacctcctcctgatgactcattttattacgaaaaatattaccgacaatcacggtaagaataaaactacagtgcacggttacttttcttcaattttccatggtggcgttgactctctagtagatttaatgaacaaaagtttccctgagttagggatcaagaaagaggattgtaaagaactttcttggatcgacacaaccatattctattcgggtgttgttaactttaataccgcaaactttaaaaaggaaattttgttagatcgctctgctggaaagaaaacagcatttagtatcaaacttgactatgtaaagaaaccgatacccgagactgccatggttaagatacttgagaagctatacgaagaggatgtgggagctggcatgtacgttctctacccttacggcggtataatggaagaaatttcagaatccgcaatcccattcccacacagagcaggtattatgtatgaactgtggtatactgcctcatgggagaaacaagaagataacgaaaaacacattaattgggtccgtagcgtctacaatttcactacaccatatgtatccaagaacccgagattggcttacttgaattatagagacttggatctaggaaaaaataatgaagagagcccgaataattatacacaggcaaggatttggggcgagaagtatttcggcaagaacttcaacagattagtaaaagttaagaccaaagttgaccccaataacttttttagaaatgaacaaagtatccctccactcccaccacatcatcat

SEQ ID NO: 992 - DNA, 1551 bp, Artificial Sequence
  Synthetic
aatccccaggagaactttcttaagtgtttcagtaaacatatcccaaataacgtggcgaatccgaaattagtatacacgcaaaacgatcagctatatatgagcattctgaatagtaccattcaaaacttgcgctttacatcggacacaactccaaagcctttagtcatagttactccttcaaatgtttcccatattcaggctacaatcctctgctctaaaaaagttgggttgcaaatacgtactagatcaggaggccacgatgccgaaggtatgtcttatatctcccaagtgccattcgttgtcgtcgacttgaggaacatgcattctattaagattgatgtacactcccagaccgcatgggttgaagctggtgccacattaggtgaagtatactattggataaacgagaaaaatgaaaatttatcgtttcctggaggctattgtccaactgttggtgtcggtggtcatttctcaggcgggggctacggagcattgatgcgaaactacggactagcagctgataacattatagacgcccatctcgtgaatgtggatggtaaagttcttgatagaaagagcatgggtgaagatttgttttgggcgatcagaggcggtggaggggaaaactttggtattattgcggcttggaaaataaagctggtccctgttccctcgaaagtaacaatcttttctgtaaagaaaaatatggaaatacatgggttggtcaagttattcaataaatggcaaaacattgcttataagtatgataaagacctcatgctgatgactcattttattacgaaaaatattaccgacaatcacggtaagaataaaactacagtgcacggttacttttcttcaattttccatggtggcgttgactctctagtagatttaatgaacaaaagtttccctgagttagggatcaagaaaacggattgtaaagaattttcttggatcgacacaaccatattctattcgggtgttgttaactttaataccgcaaactttaaaaaggaaattttgttagatcgctctgctggaaagaaaacagcatttagtatcaaacttgactatgtaaagaaaccgatacccgagactgccatggttaagatacttgagaagctatacgaagaggatgtgggagctggcatgtacgttctctacccttacggcggtataatggaagaaatttcagaatccgcaatcccattcccacacagagcaggtattatgtatgaactgtggtatactgcctcatgggagaaacaagaagataacgaaaaacacattaattgggtccgtagcgtctacaatttcactacaccatatgtatccaagaacccgagattggcttacttgaattatagagacttggatctaggaaaaaataatgaggaaagcccgaataattatacacaggcaaggatttggggcgagaagtatttcggcaagaacttcaacagattagtaaaagttaagaccaaagttgaccccaataacttttttagaaatgaacaaagtatccctccactcccaccacatcatcat

SEQ ID NO: 993 - DNA, 1551 bp, Artificial Sequence
  Synthetic
aatccccaagagaactttcttaagtgtttcagtaaacatatcccaaataacgtggcgaatccgaaattagtatacacgcaaaatgatagcctatattccagcattctgaatagtaccattcaaaacttgcgctttacatcggacacaactccaaagcctttagtcatagttactccttcaaatgtttcccatattcaggctacaatcctctgctctaaaaaagttgggttgcaaatacgtactagatcaggaggccacgatgccgaaggtatgtcttatatctcccaagtgccattcgttattgtcgacttgaggaacatgcattctattaagattgatgtacactcccagaccgcatgggttgaagctggtgccacattaggtgaagtatactattggataaacgagaaaaatgaaaatttatcgtttcctggaggctattgtccaactgttggtgtcggtggtcatttctcaggcgggggctacggagcattgatgcgaaactacggactagcagctgataacattatagacgcccatctcgtgaatgtggatggtaaagttcttgatagaaagagcatgggtgaagatttgttttgggcgatcagaggcggtggaggggaaaactttggtattattgcggcttggaaaataaagctggtccccgttccctcgaaagtcacaatcttttctgtaaagaaaaatatggaaatacatgggttggtcaagttattcaataaatggcaaaacattgcttataagtatgataaagacctcgttctgatgactcattttattacgaaaaatattaccgacaatcacggtaagaataaaactacagtgcacggttacttttcttcaattttccatggtggcgttgactctctagtagatttaatgaacaaaagtttccctgagttagggatcaagaaaacggattgtaaagaactgtcttggatcgacacaaccatattctattcgggtgttgttaactttaataccgcaaactttaaaaaggaaattttgttagatcgctctgctggaaagaaaacagcatttagtatcaaacttgactatgtaaagaaaccgatacccgagactgccatggttaagatacttgagaagctatacgaagaggatgtgggagctggcatgtacgttctctacccttacggcggtataatggaagaaatttcagaatccgcaatcccattcccacacagagcaggtattatgtatgaactgtggtatactgcctcatgggagaaacaagaagataacgaaaaacacattaattgggtccgtagcgtctacaatttcactacaccatatgtatccaagaacccgagattggcttacttgaattatagagacttggatctaggaaaaaataatgaagagagcccgaataattatacacaggcaaggatttggggcgagaagtatttcggcaagaacttcaacagattagtaaaagttaagaccaaagttgaccccaataacttttttagaaatgaacaaagtatccctccactcccaccacatcatcat

SEQ ID NO: 994 - DNA, 1551 bp, Artificial Sequence
  Synthetic
aatccccaggagaactttcttaagtgtttcagtaaacatatcccaaataacgtggcgaatccgaaattagtatacacgcaaaacgatcagctatatatgagcattctgaatagtaccattcaaaacttgcgctttacttcggacacaactccaaagcctttagtcatagttactccttcaaatgtttcccatattcaggctacaatcctctgctctaaaaaagttgggttgcaaatacgtactagatcaggaggccacgatgccgaaggtatgtcttatatctcccaagtgccattcgttgtcgtcgacttgaggaacatgcattctattaagattgatgtacactcccagaccgcatgggttgaagctggtgccacattaggtgaagtatactattggataaacgagaaaaatgaaaatttatcgtttcctggaggctattgtccaactgttggtgtcggtggtcatttctcaggcgggggctacggagcattgatgcgaaaatacggactagcagctgataacattatagacgcccatctcgtgaatgtggatggtaaagttcttgatagaaagagcatgggtgaagatttgttttgggcgatcagaggcggtggaggggaaaactttggtattattgcggcttggaaaataaagctggtcccggttccctcgaaagtaacaatcttttctgtaaagaaaaatatggaaatacatgggttggtcaagttattcaataaatggcaaaacattgcttataagtatgataaagacctcgttctgatgactcattttattacgaaaaatattaccgacaatcacggtaagaataaaactacagtgcacggttacttttcttcaattttccatggtggcgttgactctctagtagatttaatgaacaaaagtttccctgagttagggatcaagaaaacggattgtaaagaattttcttggatcgacacaaccatattctattcgggtgttgttaactttaataccgcaaactttaaaaaggaaattttgttagatcgctctgctggaaagaaaacagcatttagtatcaaacttgactatgtaaagaaaccgatacccgagactgccatggttaagatacttgagaagctatacgaagaggatgtgggagctggcatgtacgttctctacccttacggcggtataatggaagaaatttcagaatccgcaatcccattcccacacagagcaggtattatgtatgaactgtggtatactgcctcatgggagaaacaagaagataacgaaaaacacattaattgggtccgtagcgtctacaatttcactacaccatatgtatccaagaacccgagattggcttacttgaattatagagacttggatctaggaaaaaataacgaagagagcccgaataattatacacaggcaaggatttggggcgagaagtatttcggcaagaacttcaacagattagtaaaagttaagaccaaagttgaccccaataacttttttagaaatgaacaaagtatccctccactcccaccacatcatcat

SEQ ID NO: 995 - DNA, 1551 bp, Artificial Sequence
  Synthetic
aatccccaagagaactttcttaagtgtttcagtaaacatatcccaaataacgtggcgaatccgaaattagtatacacgcaaaacgatcagctatattcaagcattctgaatagtaccattcaaaacttgcgctttacatcggacacaactccaaagcctttagtcatagttactccttcaaatgtttcccatattcaggctacaatcctctgctctaaaaaagttgggttgcaaatacgtactagatcaggaggccacgatgccgaaggtatgtcttatatctcccaagtgccattcgttgtcgtcgacttgaggaacatgcattctattaagattgatgtacactcccagaccgcatgggttgaagctggtgccacattaggtgaagtatactattggataaacgagaaaaatgaaaatttatcgtttcctggaggctattgtccaactgttggtgtcggtggtcatttctcaggcgggggctacggagcattgatgcgaaactacggactagcagctgataacattatagacgcccatctcgtgaatgtggatggtaaagttcttgatagaaagagcatgggtgaagatttgttttgggcgatcagaggcggtggaggggaaaactttggtattattgcggcttggaaaataaagctggtcccggttccctcgaaagtaacaatcttttctgtaaagaaaaatatggaaatacatgggttggtcaagttattcaataaatggcaaaacattgcttataagtatgataaagacctcgttctgatgactcattttattacgaaaaatattaccgacaatcacggtaagaataaaactacagtgcacggttacttttcttcaattttccatggtggcgttgactctctagtagatttaatgaacaaaagtttccctgagttagggatcaagaaagaagattgtaaagaactttcttggatcgacacaaccatattctattcgggtgttgttaactttaataccgcaaactttaaaaaggaaattttgttagatcgctctgctggaaagaaaacagcatttagtatcaaacttgactatgtaaagaaaccgatacccgagactgccatggttaagatacttgagaagctatacgaagaggatgtgggagctggcatgtacgttctctacccttacggcggtataatggatgaaatttcagaatccgcaatcccattcccacacagagcaggtattatgtatgaactgtggtatactgcctcatgggagaaacaagaagataacgaaaaacacattaattgggtccgtagcgtctacaatttcactacaccatatgtatccaagaacccgagattggcttacttgaattatagagacttggatctaggaaaaaataatgaggaaagcccgaataattatacacaggcaaggatttggggcgagaagtatttcggcaagaacttcaacagattagtaaaagttaagaccaaagttgaccccaataacttttttagaaatgaacaaagtatccctccactcccaccacatcatcat

SEQ ID NO: 996 - DNA, 1551 bp, Artificial Sequence
  Synthetic
aatcccagggagaactttcttaagtgtttcagtaaacatatcccaaataacgtggcgaatccgaaattagtatacacgcaaaacgatagcctatattctagcattctgaatagtaccattcaaaacttgcgctttacatcggacacaactccaaagcctttagtcatagttactccttcaaatgtttcccatattcaggctacaatcctctgctctaaaaaagttgggttgcaaatacgtactagatcaggaggccacgatgccgaaggtatgtcttatatctcccaagtgccattcgttgtcgtcgacttgaggaacatgcattctattaagattgatgtacactcccagaccgcatgggttgaagctggtgccacattaggtgaagtatactattggataaacgagaaaaatgaaaatttatcgtttcctggaggctattgtccaactgttggtgtcggtggtcatttctcaggcgggggctacggagcattgatgcgaaactacggactagcagctgataacattatagacgcccatctcgtgaatgtggatggtaaagttcttgatagaaagagcatgggtgaagatttgttttgggcgatcagaggcggtggaggggaaaactttggtattattgcggcttggaaaataaagctggtcgacgttccctcgaaagtgacaatcttttctgtaaagaaaaatatggaaatacatgggttggtcaagttattcaataaatggcaaaacattgcttataagtatgataaagacctcttactgatgactcattttattacgaaaaatattaccgacaatcacggtaagaataaaactacagtgcacggttacttttcttcaattttccatggtggcgttgactctctagtagatttaatgaacaaaagtttccctgagttagggatcaagaaagaagattgtaaagaactttcttggatcgacacaaccatattctattcgggtgttgttaactttaataccgcaaactttaaaaaggaaattttgttagatcgctctgctggaaagaaaacagcatttagtatcaaacttgactatgtaaagaaaccgatacccgagactgccatggttaagatacttgagaagctatacgaagaggatgtgggagctggcatgtacgttctctacccttacggcggtataatggaagaaatttcagaatccgcaatcccattcccacacagagcaggtattatgtatgaactgtggtatactgcctcatgggagaaacaagaagataacgaaaaacacattaattgggtccgtagcgtctacaatttcactacaccatatgtatccaagaacccgagattggcttacttgaattatagagacttggatctaggaaaaaataatcatgaaagcccgaataattatacacaggcaaggatttggggcgagaagtatttcggcaagaacttcaacagattagtaaaagttaagaccaaagttgaccccaataacttttttagaaatgaacaaagtatccctccactcccaccacatcatcat

SEQ ID NO: 997 - DNA, 1551 bp, Artificial Sequence
  Synthetic
aatcccagggagaactttcttaagtgtttcagtaaacatatcccaaataacgtgaccaatccgaaattagtatacacgcaaaatgatagcctatattcaagcattctgaatagtaccattcaaaacttgcgctttacttcggacacaactccaaagcctttagtcatagttactccttcaaatgtctcccatattcaggctacaatcctctgctctaaaaaagttgggttgcaaatacgtactagatcaggaggccacgatgccgaaggtatgtcttatatctcccaagtgccattcgttgtcgtcgacttgaggaacatgcattctattaagattgatgtacactcccagaccgcatgggttgaagctggtgccacattaggtgaagtatactattggataaacgagaaaaatgaaaatttatcgtttcctggaggctattgtccaactgttggtgtcggtggtcatttctcaggcgggggctacggagcattgatgcgaaactacggactagcagctgataacattatagacgcccatctcgtgaatgtggatggtaaagttcttgatagaaagagcatgggtgaagatttgttttgggcgatcagaggcggtggaggggaaaactttggtattattgcggcttggaaaataaagctggtcgatgttccctcgaaagtaacaatcttttctgtaaagaaaaatatggaaatacatgggttggtcaagttattcaataaatggcaaaacattgcttataagtatgataaagacctcgttctgatgactcattttattacgaaaaatattaccgacaatcacggtaagaataaaactacagtgcacggttacttttcttcaattttccatggtggcgttgactctctagtagatttaatgaacaaaagtttccctgagttagggatcaagaaaacggattgtaaagaattgtcttggatcgacacaaccatattctattcgggtgttgttaactttaataccgcaaactttaaaaaggaaattttgttagatcgctctgctggaaagaaaacagcatttagtatcaaacttgactatgtaaagaaaccgatacccgagactgccatggttaagatacttgagaagctatacgaagaggatgtgggagctggcatgtacgttctctacccttacggcggtataatggaagaaatttcagaatccgcaatcccattcccacacagagcaggtattatgtatgaactgtggtatactgcctcatgggagaaacaagaagataacgaaaaacacattaattgggtccgtagcgtctacaatttcactacaccatatgtatccaaaaacccgagattggcttacttgaattatagagacttggatctaggaaaaaacaatgaggaaagcccgaataattatacacaggcaaggatttggggcgagaagtatttcggcaagaacttcaacagattagtaaaagttaagaccaaagttgaccccaataacttttttagaaatgaacaaagtatccctccactcccaccacatcatcat

SEQ ID NO: 998 - DNA, 1551 bp, Artificial Sequence
  Synthetic
aatcccagggagaactttcttaagtgtttcagtaaacatatcccaaataacgtggcgaatccgaaattagtatacacgcaaaacgatagcctatattccagcattctgaatagtaccattcaaaacttgcgctttacttcggacacaactccaaagcctttagtcatagttactccttcaaatgtttcccatattcaggctacaatcctctgctctaaaaaagttgggttgcaaatacgtactagatcaggaggccacgatgccgaaggtatgtcttatatctcccaagtgccattcgttgtcgtcgacttgaggaacatgcattctattaagattgatgtacactcccagaccgcatgggttgaagctggtgccacattaggtgaagtatactattggataaacgagaaaaatgaaaatttatcgtttcctggaggctattgtccaactgttggtgtcggtggtcatttctcaggcgggggctacggagcattgatgcgaaactacggactagcagctgataacattatagacgcccatctcgtgaatgtggatggtaaagttcttgatagaaagagcatgggtgaagatttgttttgggcgatcagaggcggtggaggggaaaactttggtattattgcggcttggaaaataaagctggtcgatgttccctcgaaagtgacaatcttttctgtaaagaaaaatatggaaatacatgggttggtcaagttattcaataaatggcaaaacattgcttataagtatgataaagacctcgttctgatgactcattttattacgaaaaatattaccgacaatcacggtaagaataaaactacagtgcacggttacttttcttcaattttccatggtggcgttgactctctagtagatttaatgaacaaaagtttccctgagttagggatcaagaaagaggattgtaaagaattgtcttggatcgacacaaccatattctattcgggtgttgttaactttaataccgcaaactttaaaaaggaaattttgttagatcgctctgctggaaagaaaacagcatttagtatcaaacttgactatgtaaagaaaccgatacccgagactgccatggttaagatacttgagaagctatacgaagaggatgtgggagctggcatgtacgttctctacccttacggcggtataatggatgaaatttcagaatccgcaatcccattcccacacagagcaggtattatgtatgaactgtggtatactgcctcatgggagaaacaagaagataacgaaaaacacattaattgggtccgtagcgtctacaatttcactacaccatatgtatccaagaacccgagattggcttacttgaattatagagacttggatctaggaaaaaataatgaggaaagcccgaataattatacacaggcaaggatttggggcgagaagtatttcggcaagaacttcaacagattagtaaaagttaagaccaaagttgaccccaataacttttttagaaatgaacaaagtatccctccactcccaccacatcatcat

SEQ ID NO: 999 - DNA, 1551 bp, Artificial Sequence
  Synthetic
aatccccaagagaactttcttaagtgtttcagtaaacatatcccaaataacgtggcgaatccgaaattagtatacacgcaaaatgatcagctatatatgagcattctgaatagtaccattcaaaacttgcgctttacttcggacacaactccaaagcctttagtcatagttactccttcaaatgtttcccatattcaggctacaatcctctgctctaaaaaagttgggttgcaaatacgtactagatcaggaggccacgatgccgaaggtatgtcttatatctcccaagtgccattcgttgtcgtcgacttgaggaacatgcattctattaagattgatgtacactcccagaccgcatgggttgaagctggtgccacattaggtgaagtatactattggataaacgagaaaaatgaaaatttatcgtttcctggaggctattgtccaactgttggtgtcggtggtcatttctcaggcgggggctacggagcattgatgcgaaactacggactagcagctgataacattatagacgcccatctcgtgaatgtggatggtaaagttcttgatagaaagagcatgggtgaagatttgttttgggcgatcagaggcggtggaggggaaaactttggtattattgcggcttggaaaataaagctggtcccagttccctcgaaagtaacaatcttttctgtaaagaaaaatatggaaatacatgggttggtcaagttattcaataaatggcaaaacattgcttataagtatgataaagacctcgttctgatgactcattttattacgaaaaatattaccgacaatcacggtaagaataaaactacagtgcacggttacttttcttcaattttccatggtggcgttgactctctagtagatttaatgaacaaaagtttccctgagttagggatcaagaaaacggattgtaaagaaatgtcttggatcgacacaaccatattctattcgggtgttgttaactttaataccgcaaactttaaaaaggaaattttgttagatcgctctgctggaaagaaaacagcatttagtatcaaacttgactatgtaaagaaaccgatacccgagactgccatggttaagatacttgagaagctatacgaagaggatgtgggagctggcatgtacgttctctacccttacggcggtataatggaagaaatttcagaatccgcaatcccattcccacacagagcaggtattatgtatgaactgtggtatactgcctcatgggagaaacaagaagataacgaaaaacacattaattgggtccgtagcgtctacaatttcactacaccatatgtatccaagaacccgagattggcttacttgaattatagagacttggatctaggaaaaaataacgaggaaagcccgaataattatacacaggcaaggatttggggcgagaagtatttcggcaagaacttcaacagattagtaaaagttaagaccaaagttgaccccaataacttttttagaaatgaacaaagtatccctccactcccaccacatcatcat

SEQ ID NO: 1000 - DNA, 1551 bp, Artificial Sequence
  Synthetic
aatcccagggagaactttcttaagtgtttcagtaaacatatcccaaataacgtggcgaatccgaaattagtatacacgcaaaacgatcagctatattccagcattctgaatagtaccattcaaaacttgcgctttacatcggacacaactccaaagcctttagtcatagttactccttcaaatgtttcccatattcaggctacaatcctctgctctaaaaaagttgggttgcaaatacgtactagatcaggaggccacgatgccgaaggtatgtcttatatctcccaagtgccattcgttgtcgtcgacttgaggaacatgcattctattaagattgatgtacactcccagaccgcatgggttgaagctggtgccacattaggtgaagtatactattggataaacgagaaaaatgaaaatttatcgtttcctggaggctattgtccaactgttggtgtcggtggtcatttctcaggcgggggctacggagcattgatgcgaaactacggactagcagctgataacattatagacgcccatctcgtgaatgtggatggtaaagttcttgatagaaagagcatgggtgaagatttgttttgggcgatcagaggcggtggaggggaaaactttggtattattgcggcttggaaaataaagctggtcgatgttccctcgaaagtaacaatcttttctgtaaagaaaaatatggaaatacatgggttggtcaagttattcaataaatggcaaaacattgcttataagtatgataaagacctcgttctgatgactcattttattacgaaaaatattaccgacaatcacggtaagaataaaactacagtgcacggttacttttcttcaattttccatggtggcgttgactctctagtagatttaatgaacaaaagtttccctgagttagggatcaagaaagaagattgtaaagaactgtcttggatcgacacaaccatattctattcgggtgttgttaactttaataccgcaaactttaaaaaggaaattttgttagatcgctctgctggaaagaaaacagcatttagtatcaaacttgactatgtaaagaaaccgatacccgagactgccatggttaagatacttgagaagctatacgaagaggatgtgggagctggcatgtacgttctctacccttacggcggtataatggaagaaatttcagaatccgcaatcccattcccacacagagcaggtattatgtatgaactgtggtatactgcctcatgggagaaacaagaagataacgaaaaacacattaattgggtccgtagcgtctacaatttcactacaccatatgtatccaaaaacccgagattggcttacttgaattatagagacttggatctaggaaaaaataatgaagagagcccgaataattatacacaggcaaggatttggggcgagaagtatttcggcaagaacttcaacagattagtaaaagttaagaccaaagttgaccccaataacttttttagaaatgaacaaagtatccctccactcccaccacatcatcat

SEQ ID NO: 1001 - DNA, 1551 bp, Artificial Sequence
  Synthetic
aatcccagggagaactttcttaagtgtttcagtaaacatatcccaaataacgtggcgaatccgaaattagtatacacgcaaaacgatcagctatattctagcattctgaatagtaccattcaaaacttgcgctttacatcggacacaactccaaagcctttagtcatagttactccttcaaatgtttcccatattcaggctacaatcctctgctctaaaaaagttgggttgcaaatacgtactagatcaggaggccacgatgccgaaggtatgtcttatatctcccaagtgccattcgttgtcgtcgacttgaggaacatgcattctattaagattgatgtacactcccagaccgcatgggttgaagctggtgccacattaggtgaagtatactattggataaacgagaaaaatgaaaatttatcgtttcctggaggctattgtccaactgttggtgtcggtggtcatttctcaggcgggggctacggagcattgatgcgaaactacggactagcagctgataacattatagacgcccatctcgtgaatgtggatggtaaagttcttgatagaaagagcatgggtgaagatttgttttgggcgatcagaggcggtggaggggaaaactttggtattattgcggcttggaaaataaagctggtcgacgttccctcgaaagttacaatcttttctgtaaagaaaaatatggaaatacatgggttggtcaagttattcaataaatggcaaaacattgcttataagtatgataaagacctcttactgatgactcattttattacgaaaaatattaccgacaatcacggtaagaataaaactacagtgcacggttacttttcttcaattttccatggtggcgttgactctctagtagatttaatgaacaaaagtttccctgagttagggatcaagaaaacggattgtaaagaactatcttggatcgacacaaccatattctattcgggtgttgttaactttaataccgcaaactttaaaaaggaaattttgttagatcgctctgctggaaagaaaacagcatttagtatcaaacttgactatgtaaagaaaccgatacccgagactgccatggttaagatacttgagaagctatacgaagaggatgtgggagctggcatgtacgttctctacccttacggcggtataatggaagaaatttcagaatccgcaatcccattcccacacagagcaggtattatgtatgaactgtggtatactgcctcatgggagaaacaagaagataacgaaaaacacattaattgggtccgtagcgtctacaatttcactacaccatatgtatccaaaaacccgagattggcttacttgaattatagagacttggatctaggaaaaaataatgaagaaagcccgaataattatacacaggcaaggatttggggcgagaagtatttcggcaagaacttcaacagattagtaaaagttaagaccaaagttgaccccaataacttttttagaaatgaacaaagtatccctccactcccaccacatcatcat

SEQ ID NO: 1002 - DNA, 1551 bp, Artificial Sequence
  Synthetic
aatcccagggagaactttcttaagtgtttcagtaaacatatcccaaataacgtggcgaatccgaaattagtatacacgcaaaacgatagcctatattccagcattctgaatagtaccattcaaaacttgcgctttacatcggacacaactccaaagcctttagtcatagttactccttcaaatgtttcccatattcaggctacaatcctctgctctaaaaaagttgggttgcaaatacgtactagatcaggaggccacgatgccgaaggtatgtcttatatctcccaagtgccattcgttgtcgtcgacttgaggaacatgcattctattaagattgatgtagaatcccagaccgcatgggttgaagctggtgccacattaggtgaagtatactattggataaacgagaaaaatgaaaatttatcgtttcctggaggctattgtccaactgttggtgtcggtggtcatttctcaggcgggggctacggagcattgatgcgaaactacggactagcagctgataacattatagacgcccatctcgtgaatgtggatggtaaagttcttgatagaaagagcatgggtgaagatttgttttgggcgatcagaggcggtggaggggaaaactttggtattattgcggcttggaaaataaagctggtcgatgttccctcgaaagtaacaatcttttctgtaaagaaaaatatggaaatacatgggttggtcaagttattcaataaatggcaaaacattgcttataagtatgataaagacctcgttctgatgactcattttattacgaaaaatattaccgacaatcacggtaagaataaaactacagtgcacggttacttttcttcaattttccatggtggcgttgactctctagtagatttaatgaacaaaagtttccctgagttagggatcaagaaaacggattgtaaagaattgtcttggatcgacacaaccatattctattcgggtgttgttaactttaataccgcaaactttaaaaaggaaattttgttagatcgctctgctggaaagaaaacagcatttagtatcaaacttgactatgtaaagaaaccgatacccgagactgccatggttaagatacttgagaagctatacgaagaggatgtgggagctggcatgtacgttctctacccttacggcggtataatggaagaaatttcagaatccgcaatcccattcccacacagagcaggtattatgtatgaactgtggtatactgcctcatgggagaaacaagaagataacgaaaaacacattaattgggtccgtagcgtctacaatttcactacaccatatgtatccaagaacccgagattggcttacttgaattatagagacttggatctaggaaaaaataatgaggaaagcccgaataattatacacaggcaaggatttggggcgagaagtatttcggcaagaacttcaacagattagtaaaagttaagaccaaagttgaccccaataacttttttagaaatgaacaaagtatccctccactcccaccacatcatcat

SEQ ID NO: 1003 - DNA, 1551 bp, Artificial Sequence
  Synthetic
aatccccaagagaactttcttaagtgtttcagtaaacatatcccaaataacgtgactaatccgaaattagtatacacgcaaaatgatagcctatattctagcattctgaatagtaccattcaaaacttgcgctttacatcggacacaactccaaagcctttagtcatagttactccttcaaatgtttcccatattcaggctacaatcctctgctctaaaaaagttgggttgcaaatacgtactagatcaggaggccacgatgccgaaggtatgtcttatatctcccaagtgccattcgttgtcgtcgacttgaggaacatgcattctattaagattgatgtagaatcccagaccgcatgggttgaagctggtgccacattaggtgaagtatactattggataaacgagaaaaatgaaaatttatcgtttcctggaggctattgtccaactgttggtgtcggtggtcatttctcaggcgggggctacggagcattgatgcgaaactacggactagcagctgataacattatagacgcccatctcgtgaatgtggatggtaaagttcttgatagaaagagcatgggtgaagatttgttttgggcgatcagaggcggtggaggggaaaactttggtattattgcggcttggaaaataaagctggtccctgttccctcgaaagtaacaatcttttctgtaaagaaaaatatggaaatacatgggttggtcaagttattcaataaatggcaaaacattgcttataagtatgataaagacctcctactgatgactcattttattacgaaaaatattaccgacaatcacggtaagaataaaactacagtgcacggttacttttcttcaattttccatggtggcgttgactctctagtagatttaatgaacaaaagtttccctgagttagggatcaagaaaacggattgtaaagaattgtcttggatcgacacaaccatattctattcgggtgttgttaactttaataccgcaaactttaaaaaggaaattttgttagatcgctctgctggaaagaaaacagcatttagtatcaaacttgactatgtaaagaaaccgatacccgagactgccatggttaagatacttgagaagctatacgaagaggatgtgggagctggcatgtacgttctctacccttacggcggtataatggaagaaatttcagaatccgcaatcccattcccacacagagcaggtattatgtatgaactgtggtatactgcctcatgggagaaacaagaagataacgaaaaacacattaattgggtccgtagcgtctacaatttcactacaccatatgtatccaaaaacccgagattggcttacttgaattatagagacttggatctaggaaaaaataatgaagagagcccgaataattatacacaggcaaggatttggggcgagaagtatttcggcaagaacttcaacagattagtaaaagttaagaccaaagttgaccccaataacttttttagaaatgaacaaagtatccctccactcccaccacatcatcat

SEQ ID NO: 1004 - DNA, 1551 bp, Artificial Sequence
  Synthetic
aatccccaagagaactttcttaagtgtttcagtaaacatatcccaaataacgtggcgaatccgaaattagtatacacgcaaaacgattcactatattccagcattctgaatagtaccattcaaaacttgcgctttacttcggacacaactccaaagcctttagtcatagttactccttcaaatgtttcccatattcaggctacaatcctctgctctaaaaaagttgggttgcaaatacgtactagatcaggaggccacgatgccgaaggtatgtcttatatctcccaagtgccattcgttgtcgtcgacttgaggaacatgcattctattaagattgatgtagaatcccagaccgcatgggttgaagctggtgccacattaggtgaagtatactattggataaacgagaaaaatgaaaatttatcgtttcctggaggctattgtccaactgttggtgtcggtggtcatttctcaggcgggggctacggagcattgatgcgaaactacggactagcagctgataacattatagacgcccatctcgtgaatgtggatggtaaagttcttgatagaaagagcatgggtgaagatttgttttgggcgatcagaggcggtggaggggaaaactttggtattattgcggcttggaaaataaagctggtccccgttccctcgaaagtaacaatcttttctgtaaagaaaaatatggaaatacatgggttggtcaagttattcaataaatggcaaaacattgcttataagtatgataaagacctcctgctgatgactcattttattacgaaaaatattaccgacaatcacggtaagaataaaactacagtgcacggttacttttcttcaattttccatggtggcgttgactctctagtagatttaatgaacaaaagtttccctgagttagggatcaagaaaacggattgtaaagaactgtcttggatcgacacaaccatattctattcgggtgttgttaactttaataccgcaaactttaaaaaggaaattttgttagatcgctctgctggaaagaaaacagcatttagtatcaaacttgactatgtaaagaaaccgatacccgagactgccatggttaagatacttgagaagctatacgaagaggatgtgggagtcggcatgtacgttctctacccttacggcggtataatggatgaaatttcagaatccgcaatcccattcccacacagagcaggtattatgtatgaactgtggtatactgcctcatgggagaaacaagaagataacgaaaaacacattaattgggtccgtagcgtctacaatttcactacaccatatgtatccaaaaacccgagattggcttacttgaattatagagacttggatctaggaaaaaataatgaggaaagcccgaataattatacacaggcaaggatttggggcgagaagtatttcggcaagaacttcaacagattagtaaaagttaagaccaaagttgaccccaataacttttttagaaatgaacaaagtatccctccactcccaccacatcatcat

SEQ ID NO: 1005 - DNA, 1551 bp, Artificial Sequence
  Synthetic
aatccccaagagaactttcttaagtgtttcagtaaacatatcccaaataacgtggcgaatccgaaattagtatacacgcaaaacgatcagctatattcaagcattctgaatagtaccattcaaaacttgcgctttacttcggacacaactccaaagcctttagtcatagttactccttcaaatgtttcccatattcaggctacaatcctctgctctaaaaaagttgggttgcaaatacgtactagatcaggaggccacgatgccgaaggtatgtcttatatctcccaagtgccattcgttgtcgtcgacttgaggaacatgcattctattaagattgatgtacactcccagaccgcatgggttgaagctggtgccacattaggtgaagtatactattggataaacgagaaaaatgaaaatttatcgtttcctggaggctattgtccaactgttggtgtcggtggtcatttctcaggcgggggctacggagcattgatgcgaaactacggactagcagctgataacattatagacgcccatctcgtgaatgtggatggtaaagttcttgatagaaagagcatgggtgaagatttgttttgggcgatcagaggcggtggaggggaaaactttggtattattgcggcttggaaaataaagctggtcccggttccctcgaaagtaacaatcttttctgtaaagaaaaatatggaaatacatgggttggtcaagttattcaataaatggcaaaacattgcttataagtatgataaagacctcttactgatgactcattttattacgaaaaatattaccgacaatcacggtaagaataaaactacagtgcacggttacttttcttcaattttccatggtggcgttgactctctagtagatttaatgaacaaaagtttccctgagttagggatcaagaaaacggattgtaaagaactatcttggatcgacacaaccatattctattcgggtgttgttaactttaataccgcaaactttaaaaaggaaattttgttagatcgctctgctggaaagaaaacagcatttagtatcaaacttgactatgtaaagaaaccgatacccgagactgccatggttaagatacttgagaagctatacgaagaggatgtgggagctggcatgtacgttctctacccttacggcggtataatggaagaaatttcagaatccgcaatcccattcccacacagagcaggtattatgtatgaactgtggtatactgcctcatgggagaaacaagaagataacgaaaaacacattaattgggtccgtagcgtctacaatttcactacaccatatgtatccaaaaacccgagattggcttacttgaattatagagacttggatctaggaaaaaataatgaagaaagcccgaataattatacacaggcaaggatttggggcgagaagtatttcggcaagaacttcaacagattagtaaaagttaagaccaaagttgaccccaataacttttttagaaatgaacaaagtatccctccactcccaccacatcatcat

SEQ ID NO: 1006 - DNA, 1551 bp, Artificial Sequence
  Synthetic
aatccccaagagaactttcttaagtgtttcagtaaacatatcccaaataacgtgacaaatccgaaattagtatacacgcaaaacgattccctatattctagcattctgaatagtaccattcaaaacttgcgctttacttcggacacaactccaaagcctttagtcatagttactccttcaaatgtttcccatattcaggctacaatcctctgctctaaaaaagttgggttgcaaatacgtactagatcaggaggccacgatgccgaaggtatgtcttatatctcccaagtgccattcgttatagtcgacttgaggaacatgcattctattaagattgatgtacactcccagaccgcatgggttgaagctggtgccacattaggtgaagtatactattggataaacgagaaaaatgaaaatttatcgtttcctggaggctattgtccaactgttggtgtcggtggtcatttctcaggcgggggctacggagcattgatgcgaaactacggactagcagctgataacattatagacgcccatctcgtgaatgtggatggtaaagttcttgatagaaagagcatgggtgaagatttgttttgggcgatcagaggcggtggaggggaaaactttggtattattgcggcttggaaaataaagctggtcccagttccctcgaaagtaacaatcttttctgtaaagaaaaatatggaaatacatgggttggtcaagttattcaataaatggcaaaacattgcttataagtatgataaagacctcttactgatgactcattttattacgaaaaatattaccgacaatcacggtaagaataaaactacagtgcacggttacttttcttcaattttccatggtggcgttgactctctagtagatttaatgaacaaaagtttccctgagttagggatcaagaaagaagattgtaaagaattgtcttggatcgacacaaccatattctattcgggtgttgttaactttaataccgcaaactttaaaaaggaaattttgttagatcgctctgctggaaagaaaacagcatttagtatcaaacttgactatgtaaagaaaccgatacccgagactgccatggttaagatacttgagaagctatacgaagaggatgtgggagctggcatgtacgttctctacccttacggcggtataatggatgaaatttcagaatccgcaatcccattcccacacagagcaggtattatgtatgaactgtggtatactgcctcatgggagaaacaagaagataacgaaaaacacattaattgggtccgtagcgtctacaatttcactacaccatatgtatccaagaacccgagattggcttacttgaattatagagacttggatctaggaaaaaataatgaagagagcccgaataattatacacaggcaaggatttggggcgagaagtatttcggcaagaacttcaacagattagtaaaagttaagaccaaagttgaccccaataacttttttagaaatgaacaaagtatccctccactcccaccacatcatcat

SEQ ID NO: 1007 - DNA, 1551 bp, Artificial Sequence
  Synthetic
aatccccaagagaactttcttaagtgtttcagtaaacatatcccaaataacgtggcgaatccgaaattagtatacacgcaaaatgatagcctatattcaagcattctgaatagtaccattcaaaacttgcgctttacttcggacacaactccaaagcctttagtcatagttactccttcaaatgtctcccatattcaggctacaatcctctgctctaaaaaagttgggttgcaaatacgtactagatcaggaggccacgatgccgaaggtatgtcttatatctcccaagtgccattcgttgtcgtcgacttgaggaacatgcattctattaagattgatgtagaatcccagaccgcatgggttgaagctggtgccacattaggtgaagtatactattggataaacgagaaaaatgaaaatttatcgtttcctggaggctattgtccaactgttggtgtcggtggtcatttctcaggcgggggctacggagcattgatgcgaaactacggactagcagctgataacattatagacgcccatctcgtgaatgtggatggtaaagttcttgatagaaagagcatgggtgaagatttgttttgggcgatcagaggcggtggaggggaaaactttggtattattgcggcttggaaaataaagctggtcccagttccctcgaaagtgacaatcttttctgtaaagaaaaatatggaaatacatgggttggtcaagttattcaataaatggcaaaacattgcttataagtatgataaagacctcgttctgatgactcattttattacgaaaaatattaccgacaatcacggtaagaataaaactacagtgcacggttacttttcttcaattttccatggtggcgttgactctctagtagatttaatgaacaaaagtttccctgagttagggatcaagaaagaggattgtaaagaactttcttggatcgacacaaccatattctattcgggtgttgttaactttaataccgcaaactttaaaaaggaaattttgttagatcgctctgctggaaagaaaacagcatttagtatcaaacttgactatgtaaagaaaccgatacccgagactgccatggttaagatacttgagaagctatacgaagaggatgtgggagctggcatgtacgttctctacccttacggcggtataatggaagaaatttcagaatccgcaatcccattcccacacagagcaggtattatgtatgaactgtggtatactgcctcatgggagaaacaagaagataacgaaaaacacattaattgggtccgtagcgtctacaatttcactacaccatatgtatccaagaacccgagattggcttacttgaattatagagacttggatctaggaaaaaacaatgaagaaagcccgaataattatacacaggcaaggatttggggcgagaagtatttcggcaagaacttcaacagattagtaaaagttaagaccaaagttgaccccaataacttttttagaaatgaacaaagtatccctccactcccaccacatcatcat

SEQ ID NO: 1008 - DNA, 1551 bp, Artificial Sequence
  Synthetic
aatcccagggagaactttcttaagtgtttcagtaaacatatcccaaataacgtgacgaatccgaaattagtatacacgcaaaacgattcactatattccagcattctgaatagtaccattcaaaacttgcgctttacttcggacacaactccaaagcctttagtcatagttactccttcaaatgtttcccatattcaggctacaatcctctgctctaaaaaagttgggttgcaaatacgtactagatcaggaggccacgatgccgaaggtatgtcttatatctcccaagtgccattcgttgtcgtcgacttgaggaacatgcattctattaagattgatgtagaatcccagaccgcatgggttgaagctggtgccacattaggtgaagtatactattggataaacgagaaaaatgaaaatttatcgtttcctggaggctattgtccaactgttggtgtcggtggtcatttctcaggcgggggctacggagcattgatgcgaaactacggactagcagctgataacattatagacgcccatctcgtgaatgtggatggtaaagttcttgatagaaagagcatgggtgaagatttgttttgggcgatcagaggcggtggaggggaaaactttggtattattgcggcttggaaaataaagctggtcgacgttccctcgaaagtaacaatcttttctgtaaagaaaaatatggaaatacatgggttggtcaagttattcaataaatggcaaaacattgcttataagtatgataaagacctcgttctgatgactcattttattacgaaaaatattaccgacaatcacggtaagaataaaactacagtgcacggttacttttcttcaattttccatggtggcgttgactctctagtagatttaatgaacaaaagtttccctgagttagggatcaagaaaacggattgtaaagaattatcttggatcgacacaaccatattctattcgggtgttgttaactttaataccgcaaactttaaaaaggaaattttgttagatcgctctgctggaaagaaaacagcatttagtatcaaacttgactatgtaaagaaaccgatacccgagactgccatggttaagatacttgagaagctatacgaagaggatgtgggagctggcatgtacgttctctacccttacggcggtataatggacgaaatttcagaatccgcaatcccattcccacacagagcaggtattatgtatgaactgtggtatactgcctcatgggagaaacaagaagataacgaaaaacacattaattgggtccgtagcgtctacaatttcactacaccatatgtatccaaaaacccgagattggcttacttgaattatagagacttggatctaggaaaaaataatgaggaaagcccgaataattatacacaggcaaggatttggggcgagaagtatttcggcaagaacttcaacagattagtaaaagttaagaccaaagttgaccccaataacttttttagaaatgaacaaagtatccctccactcccaccacatcatcat

SEQ ID NO: 1009 - DNA, 1551 bp, Artificial Sequence
  Synthetic
aatcccagggagaactttcttaagtgtttcagtaaacatatcccaaataacgtggcgaatccgaaattagtatacacgcaaaatgatcagctatattcgagcattctgaatagtaccattcaaaacttgcgctttatatcggacacaactccaaagcctttagtcatagttactccttcaaatgtatcccatattcaggctacaatcctctgctctaaaaaagttgggttgcaaatacgtactagatcaggaggccacgatgccgaaggtatgtcttatatctcccaagtgccattcgttgtcgtcgacttgaggaacatgcattctattaagattgatgtacactcccagaccgcatgggttgaagctggtgccacattaggtgaagtatactattggataaacgagaaaaatgaaaatttatcgtttcctggaggctattgtccaactgttggtgtcggtggtcatttctcaggcgggggctacggagcattgatgcgaaactacggactagcagctgataacattatagacgcccatctcgtgaatgtggatggtaaagttcttgatagaaagagcatgggtgaagatttgttttgggcgatcagaggcggtggaggggaaaactttggtattattgcggcttggaaaataaagctggtcgacgttccctcgaaagtgacaatcttttctgtaaagaaaaatatggaaatacatgggttggtcaagttattcaataaatggcaaaacattgcttataagtatgataaagacctcctactgatgactcattttattacgaaaaatattaccgacaatcacggtaagaataaaactacagtgcacggttacttttcttcaattttccatggtggcgttgactctctagtagatttaatgaacaaaagtttccctgagttagggatcaagaaaacggattgtaaagaactttcttggatcgacacaaccatattctattcgggtgttgttaactttaataccgcaaactttaaaaaggaaattttgttagatcgctctgctggaaagaaaacagcatttagtatcaaacttgactatgtaaagaaaccgatacccgagactgccatggttaagatacttgagaagctatacgaagaggatgtgggagctggcatgtacgttctctacccttacggcggtataatggaagaaatttcagaatccgcaatcccattcccacacagagcaggtattatgtatgaactgtggtatactgcctcatgggagaaacaagaagataacgaaaaacacattaattgggtccgtagcgtctacaatttcactacaccatatgtatccaagaacccgagattggcttacttgaattatagagacttggatctaggaaaaaataatcatgagagcccgaataattatacacaggcaaggatttggggcgagaagtatttcggcaagaacttcaacagattagtaaaagttaagaccaaagttgaccccaataacttttttagaaatgaacaaagtatccctccactcccaccacatcatcat

SEQ ID NO: 1010 - DNA, 1551 bp, Artificial Sequence
  Synthetic
aatcccagggagaactttcttaagtgtttcagtaaacatatcccaaataacgtggcgaatgcaaaattagtatacacgcaaaacgatagcctatattcaagcattctgaatagtaccattcaaaacttgcgctttacttcggacacaactccaaagcctttagtcatagttactccttcaaatgtttcccatattcaggctacaatcctctgctctaaaaaagttgggttgcaaatacgtactagatcaggaggccacgatgccgaaggtatgtcttatatctcccaagtgccattcgttgtcgtcgacttgaggaacatgcattctattaagattgatgtagaatcccagaccgcatgggttgaagctggtgccacattaggtgaagtatactattggataaacgagaaaaatgaaaatttatcgtttcctggaggctattgtccaactgttggtgtcggtggtcatttctcaggcgggggctacggagcattgatgcgaaactacggactagcagctgataacattatagacgcccatctcgtgaatgtggatggtaaagttcttgatagaaagagcatgggtgaagatttgttttgggcgatcagaggcggtggaggggaaaactttggtattattgcggcttggaaaataaagctggtcgacgttccctcgaaagtaacaatcttttctgtaaagaaaaatatggaaatacatgggttggtcaagttattcaataaatggcaaaacattgcttataagtatgataaagacctcctgctgatgactcattttattacgaaaaatattaccgacaatcacggtaagaataaaactacagtgcacggttacttttcttcaattttccatggtggcgttgactctctagtagatttaatgaacaaaagtttccctgagttagggatcaagaaaacggattgtaaagaactatcttggatcgacacaaccatattctattcgggtgttgttaactttaataccgcaaactttaaaaaggaaattttgttagatcgctctgctggaaagaaaacagcatttagtatcaaacttgactatgtaaagaaaccgatacccgagactgccatggttaagatacttgagaagctatacgaagaggatgtgggagctggcatgtacgttctctacccttacggcggtataatggaagaaatttcagaatccgcaatcccattcccacacagagcaggtattatgtatgaactgtggtatactgcctcatgggagaaacaagaagataacgaaaaacacattaattgggtccgtagcgtctacaatttcactacaccatatgtatccaagaacccgagattggcttacttgaattatagagacttggatctaggaaaaaataatgaggaaagcccgaataattatacacaggcaaggatttggggcgagaagtatttcggcaagaacttcaacagattagtaaaagttaagaccaaagttgaccccaataacttttttagaaatgaacaaagtatccctccactcccaccacatcatcat

SEQ ID NO: 1011 - DNA, 1551 bp, Artificial Sequence
  Synthetic
aatccccaggagaactttcttaagtgtttcagtaaacatatcccaaataacgtggcgaatccgaaattagtatacacgcaaaacgatagcctatattcaagcattctgaatagtaccattcaaaacttgcgctttacttcggacacaactccaaagcctttagtcatagttactccttcaaatgtttcccatattcaggctacaatcctctgctctaaaaaagttgggttgcaaatacgtactagatcaggaggccacgatgccgaaggtatgtcttatatctcccaagtgccattcgttgtcgtcgacttgaggaacatgcattctattaagattgatgtacactcccagaccgcatgggttgaagctggtgccacattaggtgaagtatactattggataaacgagaaaaatgaaaatttatcgtttcctggaggctattgtccaactgttggtgtcggtggtcatttctcaggcgggggctacggagcattgatgcgaaactacggactagcagctgataacattatagacgcccatctcgtgaatgtggatggtaaagttcttgatagaaagagcatgggtgaagatttgttttgggcgatcagaggcggtggaggggaaaactttggtattattgcggcttggaaaataaagctggtcccagttccctcgaaagttacaatcttttctgtaaagaaaaatatggaaatacatgggttggtcaagttattcaataaatggcaaaacattgcttataagtatgataaagacctccttctgatgactcattttattacgaaaaatattaccgacaatcacggtaagaataaaactacagtgcacggttacttttcttcaattttccatggtggcgttgactctctagtagatttaatgaacaaaagtttccctgagttagggatcaagaaaacggattgtaaagaattgtcttggatcgacacaaccatattctattcgggtgttgttaactttaataccgcaaactttaaaaaggaaattttgttagatcgctctgctggaaagaaaacagcatttagtatcaaacttgactatgtaaagaaaccgatacccgagactgccatggttaagatacttgagaagctatacgaagaggatgtgggagtcggcatgtacgttctctacccttacggcggtataatggaagaaatttcagaatccgcaatcccattcccacacagagcaggtattatgtatgaactgtggtatactgcctcatgggagaaacaagaagataacgaaaaacacattaattgggtccgtagcgtctacaatttcactacaccatatgtatccaagaacccgagattggcttacttgaattatagagacttggatctaggaaaaaataatgaggaaagcccgaataattatacacaggcaaggatttggggcgagaagtatttcggcaagaacttcaacagattagtaaaagttaagaccaaagttgaccccaataacttttttagaaatgaacaaagtatccctccactcccaccacatcatcat

SEQ ID NO: 1012 - DNA, 1551 bp, Artificial Sequence
  Synthetic
aatccccaagagaactttcttaagtgtttcagtaaacatatcccaaataacgtggcgaatccgaaattagtatacacgcaaaacgattccctatattcaagcattctgaatagtaccattcaaaacttgcgctttacttcggacacaactccaaagcctttagtcatagttactccttcaaatgtttcccatattcaggctacaatcctctgctctaaaaaagttgggttgcaaatacgtactagatcaggaggccacgatgccgaaggtatgtcttatatctcccaagtgccattcgttgtcgtcgacttgaggaacatgcattctattaagattgatgtacactcccagaccgcatgggttgaagctggtgccacattaggtgaagtatactattggataaacgagaaaaatgaaaatttatcgtttcctggaggctattgtccaactgttggtgtcggtggtcatttctcaggcgggggctacggagcattgatgcgaaactacggactagcagctgataacattatagacgcccatctcgtgaatgtggatggtaaagttcttgatagaaagagcatgggtgaagatttgttttgggcgatcagaggcggtggaggggaaaactttggtattattgcggcttggaaaataaagctggtcccggttccctcgaaagttacaatcttttctgtaaagaaaaatatggaaatacatgggttggtcaagttattcaataaatggcaaaacattgcttataagtatgataaagacctcctgctgatgactcattttattacgaaaaatattaccgacaatcacggtaagaataaaactacagtgcacggttacttttcttcaattttccatggtggcgttgactctctagtagatttaatgaacaaaagtttccctgagttagggatcaagaaaacggattgtaaagaattttcttggatcgacacaaccatattctattcgggtgttgttaactttaataccgcaaactttaaaaaggaaattttgttagatcgctctgctggaaagaaaacagcatttagtatcaaacttgactatgtaaagaaaccgatacccgagactgccatggttaagatacttgagaagctatacgaagaggatgtgggagctggcatgtacgttctctacccttacggcggtataatggatgaaatttcagaatccgcaatcccattcccacacagagcaggtattatgtatgaactgtggtatactgcctcatgggagaaacaagaagataacgaaaaacacattaattgggtccgtagcgtctacaatttcactacaccatatgtatccaagaacccgagattggcttacttgaattatagagacttggatctaggaaaaaataatgaggaaagcccgaataattatacacaggcaaggatttggggcgagaagtatttcggcaagaacttcaacagattagtaaaagttaagaccaaagttgaccccaataacttttttagaaatgaacaaagtatccctccactcccaccacatcatcat

SEQ ID NO: 1013 - DNA, 1551 bp, Artificial Sequence
  Synthetic
aatccccaagagaactttcttaagtgtttcagtaaacatatcccaaataacgtggcgaatccgaaattagtatacacgcaaaacgatcagctatattctagcattctgaatagtaccattcaaaacttgcgctttacttcggacacaactccaaagcctttagtcatagttactccttcaaatgtttcccatattcaggctacaatcctctgctctaaaaaagttgggttgcaaatacgtactagatcaggaggccacgatgccgaaggtatgtcttatatctcccaagtgccattcgttgtcgtcgacttgaggaacatgcattctattaagattgatgtacactcccagaccgcatgggttgaagctggtgccacattaggtgaagtatactattggataaacgagaaaaatgaaaatttatcgtttcctggaggctattgtccaactgttggtgtcggtggtcatttctcaggcgggggctacggagcattgatgcgaaactacggactagcagctgataacattatagacgcccatctcgtgaatgtggatggtaaagttcttgatagaaagagcatgggtgaagatttgttttgggcgatcagaggcggtggaggggaaaactttggtattattgcggcttggaaaataaagctggtcccagttccctcgaaagtaacaatcttttctgtaaagaaaaatatggaaatacatgggttggtcaagttattcaataaatggcaaaacattgcttataagtatgataaagacctcctactgatgactcattttattacgaaaaatattaccgacaatcacggtaagaataaaactacagtgcacggttacttttcttcaattttccatggtggcgttgactctctagtagatttaatgaacaaaagtttccctgagttagggatcaagaaaacggattgtaaagaattttcttggatcgacacaaccatattctattcgggtgttgttaactttaataccgcaaactttaaaaaggaaattttgttagatcgctctgctggaaagaaaacagcatttagtatcaaacttgactatgtaaagaaaccgatacccgagactgccatggttaagatacttgagaagctatacgaagaggatgtgggagctggcatgtacgttctctacccttacggcggtataatggaagaaatttcagaatccgcaatcccattcccacacagagcaggtattatgtatgaactgtggtatactgcctcatgggagaaacaagaagataacgaaaaacacattaattgggtccgtagcgtctacaatttcactacaccatatgtatccaagaacccgagattggcttacttgaattatagagacttggatctaggaaaaaataatgaagagagcccgaataattatacacaggcaaggatttggggcgagaagtatttcggcaagaacttcaacagattagtaaaagttaagaccaaagttgaccccaataacttttttagaaatgaacaaagtatccctccactcccaccacatcatcat

SEQ ID NO: 1014 - DNA, 1551 bp, Artificial Sequence
  Synthetic
aatcccagggagaactttcttaagtgtttcagtaaacatatcccaaataacgtggcgaatccgaaattagtatacacgcaaaacgattcactatattccagcattctgaatagtaccattcaaaacttgcgctttacatcggacacaactccaaagcctttagtcatagttactccttcaaatgtttcccatattcaggctacaatcctctgctctaaaaaagttgggttgcaaatacgtactagatcaggaggccacgatgccgaaggtatgtcttatatctcccaagtgccattcgttgtcgtcgacttgaggaacatgcattctattaagattgatgtacactcccagaccgcatgggttgaagctggtgccacattaggtgaagtatactattggataaacgagaaaaatgaaaatttatcgtttcctggaggctattgtccaactgttggtgtcggtggtcatttctcaggcgggggctacggagcattgatgcgaaactacggactagcagctgataacattatagacgcccatctcgtgaatgtggatggtaaagttcttgatagaaagagcatgggtgaagatttgttttgggcgatcagaggcggtggaggggaaaactttggtattattgcggcttggaaaataaagctggtcgacgttccctcgaaagtaacaatcttttctgtaaagaaaaatatggaaatacatgggttggtcaagttattcaataaatggcaaaacattgcttataagtatgataaagacctccttctgatgactcattttattacgaaaaatattaccgacaatcacggtaagaataaaactacagtgcacggttacttttcttcaattttccatggtggcgttgactctctagtagatttaatgaacaaaagtttccctgagttagggatcaagaaaacggattgtaaagaattgtcttggatcgacacaaccatattctattcgggtgttgttaactttaataccgcaaactttaaaaaggaaattttgttagatcgctctgctggaaagaaaacagcatttagtatcaaacttgactatgtaaagaaaccgatacccgagactgccatggttaagatacttgagaagctatacgaagaggatgtgggagctggcatgtacgttctctacccttacggcggtataatggacgaaatttcagaatccgcaatcccattcccacacagagcaggtattatgtatgaactgtggtatactgcctcatgggagaaacaagaagataacgaaaaacacattaattgggtccgtagcgtctacaatttcactacaccatatgtatccaagaacccgagattggcttacttgaattatagagacttggatctaggaaaaaataatcatgaaagcccgaataattatacacaggcaaggatttggggcgagaagtatttcggcaagaacttcaacagattagtaaaagttaagaccaaagttgaccccaataacttttttagaaatgaacaaagtatccctccactcccaccacatcatcat

SEQ ID NO: 1015 - DNA, 1551 bp, Artificial Sequence
  Synthetic
aatcccagggagaactttcttaagtgtttcagtaaacatatcccaaataacgtggcgaatccgaaattagtatacacgcaaaacgattctctatattccagcattctgaatagtaccattcaaaacttgcgctttacatcggacacaactccaaagcctttagtcatagttactccttcaaatgtttcccatattcaggctacaatcctctgctctaaaaaagttgggttgcaaatacgtactagatcaggaggccacgatgccgaaggtatgtcttatatctcccaagtgccattcgttgtcgtcgacttgaggaacatgcattctattaagattgatgtacactcccagaccgcatgggttgaagctggtgccacattaggtgaagtatactattggataaacgagaaaaatgaaaatttatcgtttcctggaggctattgtccaactgttggtgtcggtggtcatttctcaggcgggggctacggagcattgatgcgaaactacggactagcagctgataacattatagacgcccatctcgtgaatgtggatggtaaagttcttgatagaaagagcatgggtgaagatttgttttgggcgatcagaggcggtggaggggaaaactttggtattattgcggcttggaaaataaagctggtcgatgttccctcgaaagtaacaatcttttctgtaaagaaaaatatggaaatacatgggttggtcaagttattcaataaatggcaaaacattgcttataagtatgataaagacctcttgctgatgactcattttattacgaaaaatattaccgacaatcacggtaagaataaaactacagtgcacggttacttttcttcaattttccatggtggcgttgactctctagtagatttaatgaacaaaagtttccctgagttagggatcaagaaaacggattgtaaagaactgtcttggatcgacacaaccatattctattcgggtgttgttaactttaataccgcaaactttaaaaaggaaattttgttagatcgctctgctggaaagaaaacagcatttagtatcaaacttgactatgtaaagaaaccgatacccgagactgccatggttaagatacttgagaagctatacgaagaggatgtgggagctggcatgtacgttctctacccttacggcggtataatggacgaaatttcagaatccgcaatcccattcccacacagagcaggtattatgtatgaactgtggtatactgcctcatgggagaaacaagaagataacgaaaaacacattaattgggtccgtagcgtctacaatttcactacaccatatgtatccaagaacccgagattggcttacttgaattatagagacttggatctaggaaaaaataatgaagagagcccgaataattatacacaggcaaggatttggggcgagaagtatttcggcaagaacttcaacagattagtaaaagttaagaccaaagttgaccccaataacttttttagaaatgaacaaagtatccctccactcccaccacatcatcat

SEQ ID NO: 1016 - DNA, 1551 bp, Artificial Sequence
  Synthetic
aatccccaagagaactttcttaagtgtttcagtaaacatatcccaaataacgtggcgaatccgaaattagtatacacgcaaaacgatcagctatattcgagcattctgaatagtaccattcaaaacttgcgctttacatcggacacaactccaaagcctttagtcatagttactccttcaaatgtttcccatattcaggctacaatcctctgctctaaaaaagttgggttgcaaatacgtactagatcaggaggccacgatgccgaaggtatgtcttatatctcccaagtgccattcgttgtcgtcgacttgaggaacatgcattctattaagattgatgtacactcccagaccgcatgggttgaagctggtgccacattaggtgaagtatactattggataaacgagaaaaatgaaaatttatcgtttcctggaggctattgtccaactgttggtgtcggtggtcatttctcaggcgggggctacggagcattgatgcgaaactacggactagcagctgataacattatagacgcccatctcgtgaatgtggatggtaaagttcttgatagaaagagcatgggtgaagatttgttttgggcgatcagaggcggtggaggggaaaactttggtattattgcggcttggaaaataaagctggtcccggttccctcgaaagtgacaatcttttctgtaaagaaaaatatggaaatacatgggttggtcaagttattcaataaatggcaaaacattgcttataagtatgataaagacctcgttctgatgactcattttattacgaaaaatattaccgacaatcacggtaagaataaaactacagtgcacggttacttttcttcaattttccatggtggcgttgactctctagtagatttaatgaacaaaagtttccctgagttagggatcaagaaaacggattgtaaagaactttcttggatcgacacaaccatattctattcgggtgttgttaactttaataccgcaaactttaaaaaggaaattttgttagatcgctctgctggaaagaaaacagcatttagtatcaaacttgactatgtaaagaaaccgatacccgagactgccatggttaagatacttgagaagctatacgaagaggatgtgggagctggcatgtacgttctctacccttacggcggtataatggatgaaatttcagaatccgcaatcccattcccacacagagcaggtattatgtatgaactgtggtatactgcctcatgggagaaacaagaagataacgaaaaacacattaattgggtccgtagcgtctacaatttcactacaccatatgtatccaagaacccgagattggcttacttgaattatagagacttggatctaggaaaaaataatgaagaaagcccgaataattatacacaggcaaggatttggggcgagaagtatttcggcaagaacttcaacagattagtaaaagttaagaccaaagttgaccccaataacttttttagaaatgaacaaagtatccctccactcccaccacatcatcat

SEQ ID NO: 1017 - DNA, 1551 bp, Artificial Sequence
  Synthetic
aatccccaagagaactttcttaagtgtttcagtaaacatatcccaaataacgtggcgaatccgaaattagtatacacgcaaaatgattctctatattcgagcattctgaatagtaccattcaaaacttgcgctttacatcggacacaactccaaagcctttagtcatagttactccttcaaatgtctcccatattcaggctacaatcctctgctctaaaaaagttgggttgcaaatacgtactagatcaggaggccacgatgccgaaggtatgtcttatatctcccaagtgccattcgttgtcgtcgacttgaggaacatgcattctattaagattgatgtacactcccagaccgcatgggttgaagctggtgccacattaggtgaagtatactattggataaacgagaaaaatgaaaatttatcgtttcctggaggctattgtccaactgttggtgtcggtggtcatttctcaggcgggggctacggagcattgatgcgaaactacggactagcagctgataacattatagacgcccatctcgtgaatgtggatggtaaagttcttgatagaaagagcatgggtgaagatttgttttgggcgatcagaggcggtggaggggaaaactttggtattattgcggcttggaaaataaagctggtcccggttccctcgaaagtaacaatcttttctgtaaagaaaaatatggaaatacatgggttggtcaagttattcaataaatggcaaaacattgcttataagtatgataaagacctcctactgatgactcattttattacgaaaaatattaccgacaatcacggtaagaataaaactacagtgcacggttacttttcttcaattttccatggtggcgttgactctctagtagatttaatgaacaaaagtttccctgagttagggatcaagaaaacggattgtaaagaattttcttggatcgacacaaccatattctattcgggtgttgttaactttaataccgcaaactttaaaaaggaaattttgttagatcgctctgctggaaagaaaacagcatttagtatcaaacttgactatgtaaagaaaccgatacccgagactgccatggttaagatacttgagaagctatacgaagaggatgtgggagctggcatgtacgttctctacccttacggcggtataatggaagaaatttcagaatccgcaatcccattcccacacagagcaggtattatgtatgaactgtggtatactgcctcatgggagaaacaagaagataacgaaaaacacattaattgggtccgtagcgtctacaatttcactacaccatatgtatccaagaacccgagattggcttacttgaattatagagacttggatctaggaaaaaataacgaagagagcccgaataattatacacaggcaaggatttggggcgagaagtatttcggcaagaacttcaacagattagtaaaagttaagaccaaagttgaccccaataacttttttagaaatgaacaaagtatccctccactcccaccacatcatcat

SEQ ID NO: 1018 - DNA, 1551 bp, Artificial Sequence
  Synthetic
aatcccagggagaactttcttaagtgtttcagtaaacatatcccaaataacgtggcgaatccgaaattagtatacacgcaaaatgatagcctatattccagcattctgaatagtaccattcaaaacttgcgctttacatcggacacaactccaaagcctttagtcatagttactccttcaaatgtatcccatattcaggctacaatcctctgctctaaaaaagttgggttgcaaatacgtactagatcaggaggccacgatgccgaaggtatgtcttatatctcccaagtgccattcgttgtcgtcgacttgaggaacatgcattctattaagattgatgtacactcccagaccgcatgggttgaagctggtgccacattaggtgaagtatactattggataaacgagaaaaatgaaaatttatcgtttcctggaggctattgtccaactgttggtgtcggtggtcatttctcaggcgggggctacggagcattgatgcgaaactacggactagcagctgataacattatagacgcccatctcgtgaatgtggatggtaaagttcttgatagaaagagcatgggtgaagatttgttttgggcgatcagaggcggtggaggggaaaactttggtattattgcggcttggaaaataaagctggtcgacgttccctcgaaagtaacaatcttttctgtaaagaaaaatatggaaatacatgggttggtcaagttattcaataaatggcaaaacattgcttataagtatgataaagacctcttactgatgactcattttattacgaaaaatattaccgacaatcacggtaagaataaaactacagtgcacggttacttttcttcaattttccatggtggcgttgactctctagtagatttaatgaacaaaagtttccctgagttagggatcaagaaaacggattgtaaagaattttcttggatcgacacaaccatattctattcgggtgttgttaactttaataccgcaaactttaaaaaggaaattttgttagatcgctctgctggaaagaaaacagcatttagtatcaaacttgactatgtaaagaaaccgatacccgagactgccatggttaagatacttgagaagctatacgaagaggatgtgggagctggcatgtacgttctctacccttacggcggtataatggaagaaatttcagaatccgcaatcccattcccacacagagcaggtattatgtatgaactgtggtatactgcctcatgggagaaacaagaagataacgaaaaacacattaattgggtccgtagcgtctacaatttcactacaccatatgtatccaaaaacccgagattggcttacttgaattatagagacttggatctaggaaaaaataatcatgaaagcccgaataattatacacaggcaaggatttggggcgagaagtatttcggcaagaacttcaacagattagtaaaagttaagaccaaagttgaccccaataacttttttagaaatgaacaaagtatccctccactcccaccacatcatcat

SEQ ID NO: 1019 - DNA, 1551 bp, Artificial Sequence
  Synthetic
aatcccagggagaactttcttaagtgtttcagtaaacatatcccaaataacgtggcgaatccgaaattagtatacacgcaaaacgatcagctatattcgagcattctgaatagtaccattcaaaacttgcgctttatatcggacacaactccaaagcctttagtcatagttactccttcaaatgtttcccatattcaggctacaatcctctgctctaaaaaagttgggttgcaaatacgtactagatcaggaggccacgatgccgaaggtatgtcttatatctcccaagtgccattcgttgtcgtcgacttgaggaacatgcattctattaagattgatgtacactcccagaccgcatgggttgaagctggtgccacattaggtgaagtatactattggataaacgagaaaaatgaaaatttatcgtttcctggaggctattgtccaactgttggtgtcggtggtcatttctcaggcgggggctacggagcattgatgcgaaactacggactagcagctgataacattatagacgcccatctcgtgaatgtggatggtaaagttcttgatagaaagagcatgggtgaagatttgttttgggcgatcagaggcggtggaggggaaaactttggtattattgcggcttggaaaataaagctggtcgacgttccctcgaaagtcacaatcttttctgtaaagaaaaatatggaaatacatgggttggtcaagttattcaataaatggcaaaacattgcttataagtatgataaagacctcctactgatgactcattttattacgaaaaatattaccgacaatcacggtaagaataaaactacagtgcacggttacttttcttcaattttccatggtggcgttgactctctagtagatttaatgaacaaaagtttccctgagttagggatcaagaaaacggattgtaaagaactgtcttggatcgacacaaccatattctattcgggtgttgttaactttaataccgcaaactttaaaaaggaaattttgttagatcgctctgctggaaagaaaacagcatttagtatcaaacttgactatgtaaagaaaccgatacccgagactgccatggttaagatacttgagaagctatacgaagaggatgtgggagctggcatgtacgttctctacccttacggcggtataatggaagaaatttcagaatccgcaatcccattcccacacagagcaggtattatgtatgaactgtggtatactgcctcatgggagaaacaagaagataacgaaaaacacattaattgggtccgtagcgtctacaatttcactacaccatatgtatccaaaaacccgagattggcttacttgaattatagagacttggatctaggaaaaaataatgaagaaagcccgaataattatacacaggcaaggatttggggcgagaagtatttcggcaagaacttcaacagattagtaaaagttaagaccaaagttgaccccaataacttttttagaaatgaacaaagtatccctccactcccaccacatcatcat

SEQ ID NO: 1020 - DNA, 1551 bp, Artificial Sequence
  Synthetic
aatcccagggagaactttcttaagtgtttcagtaaacatatcccaaataacgtggcgaatccgaaattagtatacacgcaaaacgattctctatattccagcattctgaatagtaccattcaaaacttgcgctttacatcggacacaactccaaagcctttagtcatagttactccttcaaatgtttcccatattcaggctacaatcctctgctctaaaaaagttgggttgcaaatacgtactagatcaggaggccacgatgccgaaggtatgtcttatatctcccaagtgccattcgttgtcgtcgacttgaggaacatgcattctattaagattgatgtagaatcccagaccgcatgggttgaagctggtgccacattaggtgaagtatactattggataaacgagaaaaatgaaaatttatcgtttcctggaggctattgtccaactgttggtgtcggtggtcatttctcaggcgggggctacggagcattgatgcgaaactacggactagcagctgataacattatagacgcccatctcgtgaatgtggatggtaaagttcttgatagaaagagcatgggtgaagatttgttttgggcgatcagaggcggtggaggggaaaactttggtattattgcggcttggaaaataaagctggtcgacgttccctcgaaagtaacaatcttttctgtaaagaaaaatatggaaatacatgggttggtcaagttattcaataaatggcaaaacattgcttataagtatgataaagacctcgttctgatgactcattttattacgaaaaatattaccgacaatcacggtaagaataaaactacagtgcacggttacttttcttcaattttccatggtggcgttgactctctagtagatttaatgaacaaaagtttccctgagttagggatcaagaaaacggattgtaaagaattgtcttggatcgacacaaccatattctattcgggtgttgttaactttaataccgcaaactttaaaaaggaaattttgttagatcgctctgctggaaagaaaacagcatttagtatcaaacttgactatgtaaagaaaccgatacccgagactgccatggttaagatacttgagaagctatacgaagaggatgtgggagctggcatgtacgttctctacccttacggcggtataatggatgaaatttcagaatccgcaatcccattcccacacagagcaggtattatgtatgaactgtggtatactgcctcatgggagaaacaagaagataacgaaaaacacattaattgggtccgtagcgtctacaatttcactacaccatatgtatccaagaacccgagattggcttacttgaattatagagacttggatctaggaaaaaataatcatgaaagcccgaataattatacacaggcaaggatttggggcgagaagtatttcggcaagaacttcaacagattagtaaaagttaagaccaaagttgaccccaataacttttttagaaatgaacaaagtatccctccactcccaccacatcatcat

SEQ ID NO: 1021 - DNA, 1551 bp, Artificial Sequence
  Synthetic
aatccccaagagaactttcttaagtgtttcagtaaacatatcccaaataacgtgaccaatccgaaattagtatacacgcaaaacgatagcctatattcaagcattctgaatagtaccattcaaaacttgcgctttacttcggacacaactccaaagcctttagtcatagttactccttcaaatgtttcccatattcaggctacaatcctctgctctaaaaaagttgggttgcaaatacgtactagatcaggaggccacgatgccgaaggtatgtcttatatctcccaagtgccattcgttgtcgtcgacttgaggaacatgcattctattaagattgatgtagaatcccagaccgcatgggttgaagctggtgccacattaggtgaagtatactattggataaacgagaaaaatgaaaatttatcgtttcctggaggctattgtccaactgttggtgtcggtggtcatttctcaggcgggggctacggagcattgatgcgaaactacggactagcagctgataacattatagacgcccatctcgtgaatgtggatggtaaagttcttgatagaaagagcatgggtgaagatttgttttgggcgatcagaggcggtggaggggaaaactttggtattattgcggcttggaaaataaagctggtccccgttccctcgaaagtaacaatcttttctgtaaagaaaaatatggaaatacatgggttggtcaagttattcaataaatggcaaaacattgcttataagtatgataaagacctcgttctgatgactcattttattacgaaaaatattaccgacaatcacggtaagaataaaactacagtgcacggttacttttcttcaattttccatggtggcgttgactctctagtagatttaatgaacaaaagtttccctgagttagggatcaagaaagaagattgtaaagaactttcttggatcgacacaaccatattctattcgggtgttgttaactttaataccgcaaactttaaaaaggaaattttgttagatcgctctgctggaaagaaaacagcatttagtatcaaacttgactatgtaaagaaaccgatacccgagactgccatggttaagatacttgagaagctatacgaagaggatgtgggagctggcatgtacgttctctacccttacggcggtataatggaagaaatttcagaatccgcaatcccattcccacacagagcaggtattatgtatgaactgtggtatactgcctcatgggagaaacaagaagataacgaaaaacacattaattgggtccgtagcgtctacaatttcactacaccatatgtatccaaaaacccgagattggcttacttgaattatagagacttggatctaggaaaaaataatgaagaaagcccgaataattatacacaggcaaggatttggggcgagaagtatttcggcaagaacttcaacagattagtaaaagttaagaccaaagttgaccccaataacttttttagaaatgaacaaagtatccctccactcccaccacatcatcat

SEQ ID NO: 1022 - DNA, 1551 bp, Artificial Sequence
  Synthetic
aatccccaagagaactttcttaagtgtttcagtaaacatatcccaaataacgtggcgaatccgaaattagtatacacgcaaaatgatcagctatattctagcattctgaatagtaccattcaaaacttgcgctttacatcggacacaactccaaagcctttagtcatagttactccttcaaatgtttcccatattcaggctacaatcctctgctctaaaaaagttgggttgcaaatacgtactagatcaggaggccacgatgccgaaggtatgtcttatatctcccaagtgccattcgttgtcgtcgacttgaggaacatgcattctattaagattgatgtagaatcccagaccgcatgggttgaagctggtgccacattaggtgaagtatactattggataaacgagaaaaatgaaaatttatcgtttcctggaggctattgtccaactgttggtgtcggtggtcatttctcaggcgggggctacggagcattgatgcgaaactacggactagcagctgataacattatagacgcccatctcgtgaatgtggatggtaaagttcttgatagaaagagcatgggtgaagatttgttttgggcgatcagaggcggtggaggggaaaactttggtattattgcggcttggaaaataaagctggtccctgttccctcgaaagtaacaatcttttctgtaaagaaaaatatggaaatacatgggttggtcaagttattcaataaatggcaaaacattgcttataagtatgataaagacctcgttctgatgactcattttattacgaaaaatattaccgacaatcacggtaagaataaaactacagtgcacggttacttttcttcaattttccatggtggcgttgactctctagtagatttaatgaacaaaagtttccctgagttagggatcaagaaagaagattgtaaagaactttcttggatcgacacaaccatattctattcgggtgttgttaactttaataccgcaaactttaaaaaggaaattttgttagatcgctctgctggaaagaaaacagcatttagtatcaaacttgactatgtaaagaaaccgatacccgagactgccatggttaagatacttgagaagctatacgaagaggatgtgggagctggcatgtacgttctctacccttacggcggtataatggaagaaatttcagaatccgcaatcccattcccacacagagcaggtattatgtatgaactgtggtatactgcctcatgggagaaacaagaagataacgaaaaacacattaattgggtccgtagcgtctacaatttcactacaccatatgtatccaaaaacccgagattggcttacttgaattatagagacttggatctaggaaaaaataatgaagaaagcccgaataattatacacaggcaaggatttggggcgagaagtatttcggcaagaacttcaacagattagtaaaagttaagaccaaagttgaccccaataacttttttagaaatgaacaaagtatccctccactcccaccacatcatcat

SEQ ID NO: 1023 - DNA, 1551 bp, Artificial Sequence
  Synthetic
aatcccagggagaactttcttaagtgtttcagtaaacatatcccaaataacgtggcgaatccgaaattagtatacacgcaaaatgatcagctatattcaagcattctgaatagtaccattcaaaacttgcgctttacttcggacacaactccaaagcctttagtcatagttactccttcaaatgtttcccatattcaggctacaatcctctgctctaaaaaagttgggttgcaaatacgtactagatcaggaggccacgatgccgaaggtatgtcttatatctcccaagtgccattcgttgtcgtcgacttgaggaacatgcattctattaagattgatgtagaatcccagaccgcatgggttgaagctggtgccacattaggtgaagtatactattggataaacgagaaaaatgaaaatttatcgtttcctggaggctattgtccaactgttggtgtcggtggtcatttctcaggcgggggctacggagcattgatgcgaaactacggactagcagctgataacattatagacgcccatctcgtgaatgtggatggtaaagttcttgatagaaagagcatgggtgaagatttgttttgggcgatcagaggcggtggaggggaaaactttggtattattgcggcttggaaaataaagctggtcgacgttccctcgaaagtaacaatcttttctgtaaagaaaaatatggaaatacatgggttggtcaagttattcaataaatggcaaaacattgcttataagtatgataaagacctcgttctgatgactcattttattacgaaaaatattaccgacaatcacggtaagaataaaactacagtgcacggttacttttcttcaattttccatggtggcgttgactctctagtagatttaatgaacaaaagtttccctgagttagggatcaagaaaacggattgtaaagaactatcttggatcgacacaaccatattctattcgggtgttgttaactttaataccgcaaactttaaaaaggaaattttgttagatcgctctgctggaaagaaaacagcatttagtatcaaacttgactatgtaaagaaaccgatacccgagactgccatggttaagatacttgagaagctatacgaagaggatgtgggagctggcatgtacgttctctacccttacggcggtataatggaagaaatttcagaatccgcaatcccattcccacacagagcaggtattatgtatgaactgtggtatactgcctcatgggagaaacaagaagataacgaaaaacacattaattgggtccgtagcgtctacaatttcactacaccatatgtatccaaaaacccgagattggcttacttgaattatagagacttggatctaggaaaaaataatgaagagagcccgaataattatacacaggcaaggatttggggcgagaagtatttcggcaagaacttcaacagattagtaaaagttaagaccaaagttgaccccaataacttttttagaaatgaacaaagtatccctccactcccaccacatcatcat

SEQ ID NO: 1024 - DNA, 1551 bp, Artificial Sequence
  Synthetic
aatccccaggagaactttcttaagtgtttcagtaaacatatcccaaataacgtggcgaatgcaaaattagtatacacgcaaaacgatagcctatattctagcattctgaatagtaccattcaaaacttgcgctttacttcggacacaactccaaagcctttagtcatagttactccttcaaatgtttcccatattcaggctacaatcctctgctctaaaaaagttgggttgcaaatacgtactagatcaggaggccacgatgccgaaggtatgtcttatatctcccaagtgccattcgttatagtcgacttgaggaacatgcattctattaagattgatgtagaatcccagaccgcatgggttgaagctggtgccacattaggtgaagtatactattggataaacgagaaaaatgaaaatttatcgtttcctggaggctattgtccaactgttggtgtcggtggtcatttctcaggcgggggctacggagcattgatgcgaaactacggactagcagctgataacattatagacgcccatctcgtgaatgtggatggtaaagttcttgatagaaagagcatgggtgaagatttgttttgggcgatcagaggcggtggaggggaaaactttggtattattgcggcttggaaaataaagctggtcccggttccctcgaaagtaacaatcttttctgtaaagaaaaatatggaaatacatgggttggtcaagttattcaataaatggcaaaacattgcttataagtatgataaagacctcgttctgatgactcattttattacgaaaaatattaccgacaatcacggtaagaataaaactacagtgcacggttacttttcttcaattttccatggtggcgttgactctctagtagatttaatgaacaaaagtttccctgagttagggatcaagaaagaggattgtaaagaactttcttggatcgacacaaccatattctattcgggtgttgttaactttaataccgcaaactttaaaaaggaaattttgttagatcgctctgctggaaagaaaacagcatttagtatcaaacttgactatgtaaagaaaccgatacccgagactgccatggttaagatacttgagaagctatacgaagaggatgtgggagctggcatgtacgttctctacccttacggcggtataatggatgaaatttcagaatccgcaatcccattcccacacagagcaggtattatgtatgaactgtggtatactgcctcatgggagaaacaagaagataacgaaaaacacattaattgggtccgtagcgtctacaatttcactacaccatatgtatccaagaacccgagattggcttacttgaattatagagacttggatctaggaaaaaataatgaagaaagcccgaataattatacacaggcaaggatttggggcgagaagtatttcggcaagaacttcaacagattagtaaaagttaagaccaaagttgaccccaataacttttttagaaatgaacaaagtatccctccactcccaccacatcatcat

SEQ ID NO: 1025 - DNA, 1551 bp, Artificial Sequence
  Synthetic
aatccccaggagaactttcttaagtgtttcagtaaacatatcccaaataacgtggcgaatgctaaattagtatacacgcaaaacgattccctatattcaagcattctgaatagtaccattcaaaacttgcgctttacatcggacacaactccaaagcctttagtcatagttactccttcaaatgtatcccatattcaggctacaatcctctgctctaaaaaagttgggttgcaaatacgtactagatcaggaggccacgatgccgaaggtatgtcttatatctcccaagtgccattcgttgtcgtcgacttgaggaacatgcattctattaagattgatgtagaatcccagaccgcatgggttgaagctggtgccacattaggtgaagtatactattggataaacgagaaaaatgaaaatttatcgtttcctggaggctattgtccaactgttggtgtcggtggtcatttctcaggcgggggctacggagcattgatgcgaaactacggactagcagctgataacattatagacgcccatctcgtgaatgtggatggtaaagttcttgatagaaagagcatgggtgaagatttgttttgggcgatcagaggcggtggaggggaaaactttggtattattgcggcttggaaaataaagctggtcccggttccctcgaaagttacaatcttttctgtaaagaaaaatatggaaatacatgggttggtcaagttattcaataaatggcaaaacattgcttataagtatgataaagacctcgttctgatgactcattttattacgaaaaatattaccgacaatcacggtaagaataaaactacagtgcacggttacttttcttcaattttccatggtggcgttgactctctagtagatttaatgaacaaaagtttccctgagttagggatcaagaaagaggattgtaaagaactatcttggatcgacacaaccatattctattcgggtgttgttaactttaataccgcaaactttaaaaaggaaattttgttagatcgctctgctggaaagaaaacagcatttagtatcaaacttgactatgtaaagaaaccgatacccgagactgccatggttaagatacttgagaagctatacgaagaggatgtgggagctggcatgtacgttctctacccttacggcggtataatggatgaaatttcagaatccgcaatcccattcccacacagagcaggtattatgtatgaactgtggtatactgcctcatgggagaaacaagaagataacgaaaaacacattaattgggtccgtagcgtctacaatttcactacaccatatgtatccaagaacccgagattggcttacttgaattatagagacttggatctaggaaaaaataatgaagagagcccgaataattatacacaggcaaggatttggggcgagaagtatttcggcaagaacttcaacagattagtaaaagttaagaccaaagttgaccccaataacttttttagaaatgaacaaagtatccctccactcccaccacatcatcat

SEQ ID NO: 1026 - DNA, 1551 bp, Artificial Sequence
  Synthetic
aatcccagggagaactttcttaagtgtttcagtaaacatatcccaaataacgtggcgaatccgaaattagtatacacgcaaaacgatcagctatattcaagcattctgaatagtaccattcaaaacttgcgctttacatcggacacaactccaaagcctttagtcatagttactccttcaaatgtttcccatattcaggctacaatcctctgctctaaaaaagttgggttgcaaatacgtactagatcaggaggccacgatgccgaaggtatgtcttatatctcccaagtgccattcgttgtcgtcgacttgaggaacatgcattctattaagattgatgtacactcccagaccgcatgggttgaagctggtgccacattaggtgaagtatactattggataaacgagaaaaatgaaaatttatcgtttcctggaggctattgtccaactgttggtgtcggtggtcatttctcaggcgggggctacggagcattgatgcgaaactacggactagcagctgataacattatagacgcccatctcgtgaatgtggatggtaaagttcttgatagaaagagcatgggtgaagatttgttttgggcgatcagaggcggtggaggggaaaactttggtattattgcggcttggaaaataaagctggtcgacgttccctcgaaagtaacaatcttttctgtaaagaaaaatatggaaatacatgggttggtcaagttattcaataaatggcaaaacattgcttataagtatgataaagacctcctgctgatgactcattttattacgaaaaatattaccgacaatcacggtaagaataaaactacagtgcacggttacttttcttcaattttccatggtggcgttgactctctagtagatttaatgaacaaaagtttccctgagttagggatcaagaaaacggattgtaaagaactgtcttggatcgacacaaccatattctattcgggtgttgttaactttaataccgcaaactttaaaaaggaaattttgttagatcgctctgctggaaagaaaacagcatttagtatcaaacttgactatgtaaagaaaccgatacccgagactgccatggttaagatacttgagaagctatacgaagaggatgtgggagctggcatgtacgttctctacccttacggcggtataatggaagaaatttcagaatccgcaatcccattcccacacagagcaggtattatgtatgaactgtggtatactgcctcatgggagaaacaagaagataacgaaaaacacattaattgggtccgtagcgtctacaatttcactacaccatatgtatccaagaacccgagattggcttacttgaattatagagacttggatctaggaaaaaataatcatgagagcccgaataattatacacaggcaaggatttggggcgagaagtatttcggcaagaacttcaacagattagtaaaagttaagaccaaagttgaccccaataacttttttagaaatgaacaaagtatccctccactcccaccacatcatcat

SEQ ID NO: 1027 - DNA, 1551 bp, Artificial Sequence
  Synthetic
aatccccaagagaactttcttaagtgtttcagtaaacatatcccaaataacgtggcgaatgccaaattagtatacacgcaaaacgatagcctatattccagcattctgaatagtaccattcaaaacttgcgctttacatcggacacaactccaaagcctttagtcatagttactccttcaaatgtttcccatattcaggctacaatcctctgctctaaaaaagttgggttgcaaatacgtactagatcaggaggccacgatgccgaaggtatgtcttatatctcccaagtgccattcgttgtcgtcgacttgaggaacatgcattctattaagattgatgtagaatcccagaccgcatgggttgaagctggtgccacattaggtgaagtatactattggataaacgagaaaaatgaaaatttatcgtttcctggaggctattgtccaactgttggtgtcggtggtcatttctcaggcgggggctacggagcattgatgcgaaactacggactagcagctgataacattatagacgcccatctcgtgaatgtggatggtaaagttcttgatagaaagagcatgggtgaagatttgttttgggcgatcagaggcggtggaggggaaaactttggtattattgcggcttggaaaataaagctggtccctgttccctcgaaagtaacaatcttttctgtaaagaaaaatatggaaatacatgggttggtcaagttattcaataaatggcaaaacattgcttataagtatgataaagacctcgttctgatgactcattttattacgaaaaatattaccgacaatcacggtaagaataaaactacagtgcacggttacttttcttcaattttccatggtggcgttgactctctagtagatttaatgaacaaaagtttccctgagttagggatcaagaaaacggattgtaaagaattgtcttggatcgacacaaccatattctattcgggtgttgttaactttaataccgcaaactttaaaaaggaaattttgttagatcgctctgctggaaagaaaacagcatttagtatcaaacttgactatgtaaagaaaccgatacccgagactgccatggttaagatacttgagaagctatacgaagaggatgtgggagctggcatgtacgttctctacccttacggcggtataatggaagaaatttcagaatccgcaatcccattcccacacagagcaggtattatgtatgaactgtggtatactgcctcatgggagaaacaagaagataacgaaaaacacattaattgggtccgtagcgtctacaatttcactacaccatatgtatccaaaaacccgagattggcttacttgaattatagagacttggatctaggaaaaaataatgaggagagcccgaataattatacacaggcaaggatttggggcgagaagtatttcggcaagaacttcaacagattagtaaaagttaagaccaaagttgaccccaataacttttttagaaatgaacaaagtatccctccactcccaccacatcatcat

SEQ ID NO: 1028 - DNA, 1551 bp, Artificial Sequence
  Synthetic
aatcccagggagaactttcttaagtgtttcagtaaacatatcccaaataacgtggcgaatccgaaattagtatacacgcaaaacgattcactatattccagcattctgaatagtaccattcaaaacttgcgctttacttcggacacaactccaaagcctttagtcatagttactccttcaaatgtttcccatattcaggctacaatcctctgctctaaaaaagttgggttgcaaatacgtactagatcaggaggccacgatgccgaaggtatgtcttatatctcccaagtgccattcgttgtcgtcgacttgaggaacatgcattctattaagattgatgtacactcccagaccgcatgggttgaagctggtgccacattaggtgaagtatactattggataaacgagaaaaatgaaaatttatcgtttcctggaggctattgtccaactgttggtgtcggtggtcatttctcaggcgggggctacggagcattgatgcgaaactacggactagcagctgataacattatagacgcccatctcgtgaatgtggatggtaaagttcttgatagaaagagcatgggtgaagatttgttttgggcgatcagaggcggtggaggggaaaactttggtattattgcggcttggaaaataaagctggtcgatgttccctcgaaagtaacaatcttttctgtaaagaaaaatatggaaatacatgggttggtcaagttattcaataaatggcaaaacattgcttataagtatgataaagacctcttactgatgactcattttattacgaaaaatattaccgacaatcacggtaagaataaaactacagtgcacggttacttttcttcaattttccatggtggcgttgactctctagtagatttaatgaacaaaagtttccctgagttagggatcaagaaaacggattgtaaagaactttcttggatcgacacaaccatattctattcgggtgttgttaactttaataccgcaaactttaaaaaggaaattttgttagatcgctctgctggaaagaaaacagcatttagtatcaaacttgactatgtaaagaaaccgatacccgagactgccatggttaagatacttgagaagctatacgaagaggatgtgggagctggcatgtacgttctctacccttacggcggtataatggaagaaatttcagaatccgcaatcccattcccacacagagcaggtattatgtatgaactgtggtatactgcctcatgggagaaacaagaagataacgaaaaacacattaattgggtccgtagcgtctacaatttcactacaccatatgtatccaaaaacccgagattggcttacttgaattatagagacttggatctaggaaaaaataatgaagagagcccgaataattatacacaggcaaggatttggggcgagaagtatttcggcaagaacttcaacagattagtaaaagttaagaccaaagttgaccccaataacttttttagaaatgaacaaagtatccctccactcccaccacatcatcat

SEQ ID NO: 1029 - DNA, 1551 bp, Artificial Sequence
  Synthetic
aatccccaagagaactttcttaagtgtttcagtaaacatatcccaaataacgtgacaaatccgaaattagtatacacgcaaaacgattcactatattcgagcattctgaatagtaccattcaaaacttgcgctttacttcggacacaactccaaagcctttagtcatagttactccttcaaatgtttcccatattcaggctacaatcctctgctctaaaaaagttgggttgcaaatacgtactagatcaggaggccacgatgccgaaggtatgtcttatatctcccaagtgccattcgttgtcgtcgacttgaggaacatgcattctattaagattgatgtagaatcccagaccgcatgggttgaagctggtgccacattaggtgaagtatactattggataaacgagaaaaatgaaaatttatcgtttcctggaggctattgtccaactgttggtgtcggtggtcatttctcaggcgggggctacggagcattgatgcgaaactacggactagcagctgataacattatagacgcccatctcgtgaatgtggatggtaaagttcttgatagaaagagcatgggtgaagatttgttttgggcgatcagaggcggtggaggggaaaactttggtattattgcggcttggaaaataaagctggtcccggttccctcgaaagtaacaatcttttctgtaaagaaaaatatggaaatacatgggttggtcaagttattcaataaatggcaaaacattgcttataagtatgataaagacctcgttctgatgactcattttattacgaaaaatattaccgacaatcacggtaagaataaaactacagtgcacggttacttttcttcaattttccatggtggcgttgactctctagtagatttaatgaacaaaagtttccctgagttagggatcaagaaagaggattgtaaagaactttcttggatcgacacaaccatattctattcgggtgttgttaactttaataccgcaaactttaaaaaggaaattttgttagatcgctctgctggaaagaaaacagcatttagtatcaaacttgactatgtaaagaaaccgatacccgagactgccatggttaagatacttgagaagctatacgaagaggatgtgggagctggcatgtacgttctctacccttacggcggtataatggatgaaatttcagaatccgcaatcccattcccacacagagcaggtattatgtatgaactgtggtatactgcctcatgggagaaacaagaagataacgaaaaacacattaattgggtccgtagcgtctacaatttcactacaccatatgtatccaagaacccgagattggcttacttgaattatagagacttggatctaggaaaaaataatgaagagagcccgaataattatacacaggcaaggatttggggcgagaagtatttcggcaagaacttcaacagattagtaaaagttaagaccaaagttgaccccaataacttttttagaaatgaacaaagtatccctccactcccaccacatcatcat

SEQ ID NO: 1030 - DNA, 1551 bp, Artificial Sequence
  Synthetic
aatcccagggagaactttcttaagtgtttcagtaaacatatcccaaataacgtggcgaatccgaaattagtatacacgcaaaacgatcagctatattccagcattctgaatagtaccattcaaaacttgcgctttatatcggacacaactccaaagcctttagtcatagttactccttcaaatgtttcccatattcaggctacaatcctctgctctaaaaaagttgggttgcaaatacgtactagatcaggaggccacgatgccgaaggtatgtcttatatctcccaagtgccattcgttgtcgtcgacttgaggaacatgcattctattaagattgatgtacactcccagaccgcatgggttgaagctggtgccacattaggtgaagtatactattggataaacgagaaaaatgaaaatttatcgtttcctggaggctattgtccaactgttggtgtcggtggtcatttctcaggcgggggctacggagcattgatgcgaaactacggactagcagctgataacattatagacgcccatctcgtgaatgtggatggtaaagttcttgatagaaagagcatgggtgaagatttgttttgggcgatcagaggcggtggaggggaaaactttggtattattgcggcttggaaaataaagctggtcgacgttccctcgaaagtaacaatcttttctgtaaagaaaaatatggaaatacatgggttggtcaagttattcaataaatggcaaaacattgcttataagtatgataaagacctcgttctgatgactcattttattacgaaaaatattaccgacaatcacggtaagaataaaactacagtgcacggttacttttcttcaattttccatggtggcgttgactctctagtagatttaatgaacaaaagtttccctgagttagggatcaagaaaacggattgtaaagaattgtcttggatcgacacaaccatattctattcgggtgttgttaactttaataccgcaaactttaaaaaggaaattttgttagatcgctctgctggaaagaaaacagcatttagtatcaaacttgactatgtaaagaaaccgatacccgagactgccatggttaagatacttgagaagctatacgaagaggatgtgggagctggcatgtacgttctctacccttacggcggtataatggatgaaatttcagaatccgcaatcccattcccacacagagcaggtattatgtatgaactgtggtatactgcctcatgggagaaacaagaagataacgaaaaacacattaattgggtccgtagcgtctacaatttcactacaccatatgtatccaaaaacccgagattggcttacttgaattatagagacttggatctaggaaaaaataatcatgaaagcccgaataattatacacaggcaaggatttggggcgagaagtatttcggcaagaacttcaacagattagtaaaagttaagaccaaagttgaccccaataacttttttagaaatgaacaaagtatccctccactcccaccacatcatcat

SEQ ID NO: 1031 - DNA, 1551 bp, Artificial Sequence
  Synthetic
aatccccaggagaactttcttaagtgtttcagtaaacatatcccaaataacgtggcgaatccgaaattagtatacacgcaaaacgattcactatattcgagcattctgaatagtaccattcaaaacttgcgctttacatcggacacaactccaaagcctttagtcatagttactccttcaaatgtttcccatattcaggctacaatcctctgctctaaaaaagttgggttgcaaatacgtactagatcaggaggccacgatgccgaaggtatgtcttatatctcccaagtgccattcgttgtcgtcgacttgaggaacatgcattctattaagattgatgtacactcccagaccgcatgggttgaagctggtgccacattaggtgaagtatactattggataaacgagaaaaatgaaaatttatcgtttcctggaggctattgtccaactgttggtgtcggtggtcatttctcaggcgggggctacggagcattgatgcgaaactacggactagcagctgataacattatagacgcccatctcgtgaatgtggatggtaaagttcttgatagaaagagcatgggtgaagatttgttttgggcgatcagaggcggtggaggggaaaactttggtattattgcggcttggaaaataaagctggtcccagttccctcgaaagtaacaatcttttctgtaaagaaaaatatggaaatacatgggttggtcaagttattcaataaatggcaaaacattgcttataagtatgataaagacctcgttctgatgactcattttattacgaaaaatattaccgacaatcacggtaagaataaaactacagtgcacggttacttttcttcaattttccatggtggcgttgactctctagtagatttaatgaacaaaagtttccctgagttagggatcaagaaagaagattgtaaagaattttcttggatcgacacaaccatattctattcgggtgttgttaactttaataccgcaaactttaaaaaggaaattttgttagatcgctctgctggaaagaaaacagcatttagtatcaaacttgactatgtaaagaaaccgatacccgagactgccatggttaagatacttgagaagctatacgaagaggatgtgggagctggcatgtacgttctctacccttacggcggtataatggaagaaatttcagaatccgcaatcccattcccacacagagcaggtattatgtatgaactgtggtatactgcctcatgggagaaacaagaagataacgaaaaacacattaattgggtccgtagcgtctacaatttcactacaccatatgtatccaagaacccgagattggcttacttgaattatagagacttggatctaggaaaaaataatgaggaaagcccgaataattatacacaggcaaggatttggggcgagaagtatttcggcaagaacttcaacagattagtaaaagttaagaccaaagttgaccccaataacttttttagaaatgaacaaagtatccctccactcccaccacatcatcat

SEQ ID NO: 1032 - DNA, 1551 bp, Artificial Sequence
  Synthetic
aatccccaggagaactttcttaagtgtttcagtaaacatatcccaaataacgtgactaatccgaaattagtatacacgcaaaacgattccctatattctagcattctgaatagtaccattcaaaacttgcgctttacatcggacacaactccaaagcctttagtcatagttactccttcaaatgtttcccatattcaggctacaatcctctgctctaaaaaagttgggttgcaaatacgtactagatcaggaggccacgatgccgaaggtatgtcttatatctcccaagtgccattcgttattgtcgacttgaggaacatgcattctattaagattgatgtagaatcccagaccgcatgggttgaagctggtgccacattaggtgaagtatactattggataaacgagaaaaatgaaaatttatcgtttcctggaggctattgtccaactgttggtgtcggtggtcatttctcaggcgggggctacggagcattgatgcgaaactacggactagcagctgataacattatagacgcccatctcgtgaatgtggatggtaaagttcttgatagaaagagcatgggtgaagatttgttttgggcgatcagaggcggtggaggggaaaactttggtattattgcggcttggaaaataaagctggtccctgttccctcgaaagtaacaatcttttctgtaaagaaaaatatggaaatacatgggttggtcaagttattcaataaatggcaaaacattgcttataagtatgataaagacctcttactgatgactcattttattacgaaaaatattaccgacaatcacggtaagaataaaactacagtgcacggttacttttcttcaattttccatggtggcgttgactctctagtagatttaatgaacaaaagtttccctgagttagggatcaagaaaacggattgtaaagaactttcttggatcgacacaaccatattctattcgggtgttgttaactttaataccgcaaactttaaaaaggaaattttgttagatcgctctgctggaaagaaaacagcatttagtatcaaacttgactatgtaaagaaaccgatacccgagactgccatggttaagatacttgagaagctatacgaagaggatgtgggagctggcatgtacgttctctacccttacggcggtataatggatgaaatttcagaatccgcaatcccattcccacacagagcaggtattatgtatgaactgtggtatactgcctcatgggagaaacaagaagataacgaaaaacacattaattgggtccgtagcgtctacaatttcactacaccatatgtatccaagaacccgagattggcttacttgaattatagagacttggatctaggaaaaaataatgaagaaagcccgaataattatacacaggcaaggatttggggcgagaagtatttcggcaagaacttcaacagattagtaaaagttaagaccaaagttgaccccaataacttttttagaaatgaacaaagtatccctccactcccaccacatcatcat

SEQ ID NO: 1033 - DNA, 1551 bp, Artificial Sequence
  Synthetic
aatcccagggagaactttcttaagtgtttcagtaaacatatcccaaataacgtggcgaatccgaaattagtatacacgcaaaacgatcagctatattccagcattctgaatagtaccattcaaaacttgcgctttatatcggacacaactccaaagcctttagtcatagttactccttcacacgtttcccatattcaggctacaatcctctgcgccaaaaaagttgggttgcaaatacgtactagatcaggaggccacgatgccgaaggtatgtcttatatctcccaagtgccattcgttgtcgtcgacttgaggaacatgcattctattaagattgatgtacactcccagaccgcatgggttcaagctggtgccacattaggtgaagtatactattggataaacgagaaaaatgaaaatttatcgtttcctggaggctattgtccaactgttggtgtcggtggtcatttctcaggcgggggctacggagcattgatgcgaaaatacggactagcagctgataacattatagacgcccatctcgtggatgtggatggtaaagttcttgatagaaagagcatgggtgaagatttgttttgggcgatcagaggcggtggaggggaaaactttggtattattgcggcttggaaaataaagctggtcgacgttccctcgaaagtaacaatcttttctgtaaagaaaaatatggaaatacatgggttggtcaagttattcaataaatggcaaaacattgcttataagtatgataaagacctcgttctgatgactcattttattacgaaaaatattaccgacaatcacggtaagaataaaactacagtgcacggttacttttcttcaattttccatggtggcgttgactctctagtagatttaatgaacaaaagtttccctgagttagggatcaagaaaacggattgtaaagaaatgtcttggatcgacacaaccatattctattcgggtgttgttaactttaataccgcaaactttaaaaaggaaattttgttagatcgctctgctggaaagaaaacagcatttagtatcaaacttgactatgtaaagaaaccgatacccgagactgccatggttaagatacttgagaagctatacgaagaggatgtgggagctggcatgtacgttctctacccttacggcggtataatggaagaaatttcagaatccgcaatcccattcccacacagagcaggtattatgtatgaaatctggtatactgcctcatgggagaaacaagaagataacgaaaaacacattaattgggtccgtagcgtctacaatttcactacaccatatgtatccaagaacccgagattggcttacttgaattatagagacttggatctaggaaaaaataatcatgaaagcccgaataattatacacaggcaaggatttggggcgagaagtatttcggcaagaacttcaacagattagtaaaagttaagaccaaagttgaccccaataacttttttagaaatgaacaaagtatccctccactcccaccacatcatcat

SEQ ID NO: 1034 - DNA, 1551 bp, Artificial Sequence
  Synthetic
aatccccaagagaactttcttaagtgtttcagtaaacatatcccaaataacgtggcgaatgctaaattagtatacacgcaaaatgattctctatattcgagcattctgaatagtaccattcaaaacttgcgctttacttcggacacaactccaaagcctttagtcatagttactccttcaaatgtttcccatattcaggctacaatcctctgctctaaaaaagttgggttgcaaatacgtactagatcaggaggccacgatgccgaaggtatgtcttatatctcccaagtgccattcgttgtcgtcgacttgaggaacatgcattctattaagattgatgtagaatcccagaccgcatgggttgaagctggtgccacattaggtgaagtatactattggataaacgagaaaaatgaaaatttatcgtttcctggaggctattgtccaactgttggtgtcggtggtcatttctcaggcgggggctacggagcattgatgcgaaactacggactagcagctgataacattatagacgcccatctcgtgaatgtggatggtaaagttcttgatagaaagagcatgggtgaagatttgttttgggcgatcagaggcggtggaggggaaaactttggtattattgcggcttggaaaataaagctggtcccggttccctcgaaagtaacaatcttttctgtaaagaaaaatatggaaatacatgggttggtcaagttattcaataaatggcaaaacattgcttataagtatgataaagacctcttgctgatgactcattttattacgaaaaatattaccgacaatcacggtaagaataaaactacagtgcacggttacttttcttcaattttccatggtggcgttgactctctagtagatttaatgaacaaaagtttccctgagttagggatcaagaaagaggattgtaaagaattgtcttggatcgacacaaccatattctattcgggtgttgttaactttaataccgcaaactttaaaaaggaaattttgttagatcgctctgctggaaagaaaacagcatttagtatcaaacttgactatgtaaagaaaccgatacccgagactgccatggttaagatacttgagaagctatacgaagaggatgtgggagctggcatgtacgttctctacccttacggcggtataatggatgaaatttcagaatccgcaatcccattcccacacagagcaggtattatgtatgaactgtggtatactgcctcatgggagaaacaagaagataacgaaaaacacattaattgggtccgtagcgtctacaatttcactacaccatatgtatccaaaaacccgagattggcttacttgaattatagagacttggatctaggaaaaaataatgaggaaagcccgaataattatacacaggcaaggatttggggcgagaagtatttcggcaagaacttcaacagattagtaaaagttaagaccaaagttgaccccaataacttttttagaaatgaacaaagtatccctccactcccaccacatcatcat

SEQ ID NO: 1035 - DNA, 1551 bp, Artificial Sequence
  Synthetic
aatccccaggagaactttcttaagtgtttcagtaaacatatcccaaataacgtggcgaatccgaaattagtatacacgcaaaatgattccctatattcaagcattctgaatagtaccattcaaaacttgcgctttacatcggacacaactccaaagcctttagtcatagttactccttcaaatgtttcccatattcaggctacaatcctctgctctaaaaaagttgggttgcaaatacgtactagatcaggaggccacgatgccgaaggtatgtcttatatctcccaagtgccattcgttgtcgtcgacttgaggaacatgcattctattaagattgatgtacactcccagaccgcatgggttgaagctggtgccacattaggtgaagtatactattggataaacgagaaaaatgaaaatttatcgtttcctggaggctattgtccaactgttggtgtcggtggtcatttctcaggcgggggctacggagcattgatgcgaaactacggactagcagctgataacattatagacgcccatctcgtgaatgtggatggtaaagttcttgatagaaagagcatgggtgaagatttgttttgggcgatcagaggcggtggaggggaaaactttggtattattgcggcttggaaaataaagctggtcccggttccctcgaaagtgacaatcttttctgtaaagaaaaatatggaaatacatgggttggtcaagttattcaataaatggcaaaacattgcttataagtatgataaagacctcgttctgatgactcattttattacgaaaaatattaccgacaatcacggtaagaataaaactacagtgcacggttacttttcttcaattttccatggtggcgttgactctctagtagatttaatgaacaaaagtttccctgagttagggatcaagaaaacggattgtaaagaattttcttggatcgacacaaccatattctattcgggtgttgttaactttaataccgcaaactttaaaaaggaaattttgttagatcgctctgctggaaagaaaacagcatttagtatcaaacttgactatgtaaagaaaccgatacccgagactgccatggttaagatacttgagaagctatacgaagaggatgtgggagctggcatgtacgttctctacccttacggcggtataatggaagaaatttcagaatccgcaatcccattcccacacagagcaggtattatgtatgaactgtggtatactgcctcatgggagaaacaagaagataacgaaaaacacattaattgggtccgtagcgtctacaatttcactacaccatatgtatccaaaaacccgagattggcttacttgaattatagagacttggatctaggaaaaaataacgaagaaagcccgaataattatacacaggcaaggatttggggcgagaagtatttcggcaagaacttcaacagattagtaaaagttaagaccaaagttgaccccaataacttttttagaaatgaacaaagtatccctccactcccaccacatcatcat

SEQ ID NO: 1036 - DNA, 1551 bp, Artificial Sequence
  Synthetic
aatccccaagagaactttcttaagtgtttcagtaaacatatcccaaataacgtggcgaatgcaaaattagtatacacgcaaaatgatagcctatattcgagcattctgaatagtaccattcaaaacttgcgctttacatcggacacaactccaaagcctttagtcatagttactccttcaaatgtttcccatattcaggctacaatcctctgctctaaaaaagttgggttgcaaatacgtactagatcaggaggccacgatgccgaaggtatgtcttatatctcccaagtgccattcgttgtcgtcgacttgaggaacatgcattctattaagattgatgtacactcccagaccgcatgggttgaagctggtgccacattaggtgaagtatactattggataaacgagaaaaatgaaaatttatcgtttcctggaggctattgtccaactgttggtgtcggtggtcatttctcaggcgggggctacggagcattgatgcgaaactacggactagcagctgataacattatagacgcccatctcgtgaatgtggatggtaaagttcttgatagaaagagcatgggtgaagatttgttttgggcgatcagaggcggtggaggggaaaactttggtattattgcggcttggaaaataaagctggtcccggttccctcgaaagtaacaatcttttctgtaaagaaaaatatggaaatacatgggttggtcaagttattcaataaatggcaaaacattgcttataagtatgataaagacctcgttctgatgactcattttattacgaaaaatattaccgacaatcacggtaagaataaaactacagtgcacggttacttttcttcaattttccatggtggcgttgactctctagtagatttaatgaacaaaagtttccctgagttagggatcaagaaaacggattgtaaagaattttcttggatcgacacaaccatattctattcgggtgttgttaactttaataccgcaaactttaaaaaggaaattttgttagatcgctctgctggaaagaaaacagcatttagtatcaaacttgactatgtaaagaaaccgatacccgagactgccatggttaagatacttgagaagctatacgaagaggatgtgggagctggcatgtacgttctctacccttacggcggtataatggaagaaatttcagaatccgcaatcccattcccacacagagcaggtattatgtatgaactgtggtatactgcctcatgggagaaacaagaagataacgaaaaacacattaattgggtccgtagcgtctacaatttcactacaccatatgtatccaagaacccgagattggcttacttgaattatagagacttggatctaggaaaaaacaatgaagagagcccgaataattatacacaggcaaggatttggggcgagaagtatttcggcaagaacttcaacagattagtaaaagttaagaccaaagttgaccccaataacttttttagaaatgaacaaagtatccctccactcccaccacatcatcat

SEQ ID NO: 1037 - DNA, 1551 bp, Artificial Sequence
  Synthetic
aatccccaggagaactttcttaagtgtttcagtaaacatatcccaaataacgtggcgaatccgaaattagtatacacgcaaaatgattctctatattcgagcattctgaatagtaccattcaaaacttgcgctttacttcggacacaactccaaagcctttagtcatagttactccttcaaatgtttcccatattcaggctacaatcctctgctctaaaaaagttgggttgcaaatacgtactagatcaggaggccacgatgccgaaggtatgtcttatatctcccaagtgccattcgttgtcgtcgacttgaggaacatgcattctattaagattgatgtagaatcccagaccgcatgggttgaagctggtgccacattaggtgaagtatactattggataaacgagaaaaatgaaaatttatcgtttcctggaggctattgtccaactgttggtgtcggtggtcatttctcaggcgggggctacggagcattgatgcgaaactacggactagcagctgataacattatagacgcccatctcgtgaatgtggatggtaaagttcttgatagaaagagcatgggtgaagatttgttttgggcgatcagaggcggtggaggggaaaactttggtattattgcggcttggaaaataaagctggtcccggttccctcgaaagtaacaatcttttctgtaaagaaaaatatggaaatacatgggttggtcaagttattcaataaatggcaaaacattgcttataagtatgataaagacctcctgctgatgactcattttattacgaaaaatattaccgacaatcacggtaagaataaaactacagtgcacggttacttttcttcaattttccatggtggcgttgactctctagtagatttaatgaacaaaagtttccctgagttagggatcaagaaagaggattgtaaagaactatcttggatcgacacaaccatattctattcgggtgttgttaactttaataccgcaaactttaaaaaggaaattttgttagatcgctctgctggaaagaaaacagcatttagtatcaaacttgactatgtaaagaaaccgatacccgagactgccatggttaagatacttgagaagctatacgaagaggatgtgggagttggcatgtacgttctctacccttacggcggtataatggatgaaatttcagaatccgcaatcccattcccacacagagcaggtattatgtatgaactgtggtatactgcctcatgggagaaacaagaagataacgaaaaacacattaattgggtccgtagcgtctacaatttcactacaccatatgtatccaaaaacccgagattggcttacttgaattatagagacttggatctaggaaaaaataacgaggaaagcccgaataattatacacaggcaaggatttggggcgagaagtatttcggcaagaacttcaacagattagtaaaagttaagaccaaagttgaccccaataacttttttagaaatgaacaaagtatccctccactcccaccacatcatcat

SEQ ID NO: 1038 - DNA, 1551 bp, Artificial Sequence
  Synthetic
aatccccaggagaactttcttaagtgtttcagtaaacatatcccaaataacgtggcgaatccgaaattagtatacacgcaaaacgatcagctatattccagcattctgaatagtaccattcaaaacttgcgctttacatcggacacaactccaaagcctttagtcatagttactccttcaaatgtttcccatattcaggctacaatcctctgctctaaaaaagttgggttgcaaatacgtactagatcaggaggccacgatgccgaaggtatgtcttatatctcccaagtgccattcgttgtcgtcgacttgaggaacatgcattctattaagattgatgtagaatcccagaccgcatgggttgaagctggtgccacattaggtgaagtatactattggataaacgagaaaaatgaaaatttatcgtttcctggaggctattgtccaactgttggtgtcggtggtcatttctcaggcgggggctacggagcattgatgcgaaactacggactagcagctgataacattatagacgcccatctcgtgaatgtggatggtaaagttcttgatagaaagagcatgggtgaagatttgttttgggcgatcagaggcggtggaggggaaaactttggtattattgcggcttggaaaataaagctggtcccagttccctcgaaagtaacaatcttttctgtaaagaaaaatatggaaatacatgggttggtcaagttattcaataaatggcaaaacattgcttataagtatgataaagacctcttgctgatgactcattttattacgaaaaatattaccgacaatcacggtaagaataaaactacagtgcacggttacttttcttcaattttccatggtggcgttgactctctagtagatttaatgaacaaaagtttccctgagttagggatcaagaaaacggattgtaaagaactatcttggatcgacacaaccatattctattcgggtgttgttaactttaataccgcaaactttaaaaaggaaattttgttagatcgctctgctggaaagaaaacagcatttagtatcaaacttgactatgtaaagaaaccgatacccgagactgccatggttaagatacttgagaagctatacgaagaggatgtgggagctggcatgtacgttctctacccttacggcggtataatggaagaaatttcagaatccgcaatcccattcccacacagagcaggtattatgtatgaactgtggtatactgcctcatgggagaaacaagaagataacgaaaaacacattaattgggtccgtagcgtctacaatttcactacaccatatgtatccaaaaacccgagattggcttacttgaattatagagacttggatctaggaaaaaataatgaagaaagcccgaataattatacacaggcaaggatttggggcgagaagtatttcggcaagaacttcaacagattagtaaaagttaagaccaaagttgaccccaataacttttttagaaatgaacaaagtatccctccactcccaccacatcatcat

SEQ ID NO: 1039 - DNA, 1551 bp, Artificial Sequence
  Synthetic
aatcccagggagaactttcttaagtgtttcagtaaacatatcccaaataacgtggcgaatccgaaattagtatacacgcaaaacgattctctatattccagcattctgaatagtaccattcaaaacttgcgctttacttcggacacaactccaaagcctttagtcatagttactccttcaaatgtttcccatattcaggctacaatcctctgctctaaaaaagttgggttgcaaatacgtactagatcaggaggccacgatgccgaaggtatgtcttatatctcccaagtgccattcgttgtcgtcgacttgaggaacatgcattctattaagattgatgtacactcccagaccgcatgggttgaagctggtgccacattaggtgaagtatactattggataaacgagaaaaatgaaaatttatcgtttcctggaggctattgtccaactgttggtgtcggtggtcatttctcaggcgggggctacggagcattgatgcgaaactacggactagcagctgataacattatagacgcccatctcgtgaatgtggatggtaaagttcttgatagaaagagcatgggtgaagatttgttttgggcgatcagaggcggtggaggggaaaactttggtattattgcggcttggaaaataaagctggtcgatgttccctcgaaagtaacaatcttttctgtaaagaaaaatatggaaatacatgggttggtcaagttattcaataaatggcaaaacattgcttataagtatgataaagacctccttctgatgactcattttattacgaaaaatattaccgacaatcacggtaagaataaaactacagtgcacggttacttttcttcaattttccatggtggcgttgactctctagtagatttaatgaacaaaagtttccctgagttagggatcaagaaagaagattgtaaagaactttcttggatcgacacaaccatattctattcgggtgttgttaactttaataccgcaaactttaaaaaggaaattttgttagatcgctctgctggaaagaaaacagcatttagtatcaaacttgactatgtaaagaaaccgatacccgagactgccatggttaagatacttgagaagctatacgaagaggatgtgggagctggcatgtacgttctctacccttacggcggtataatggatgaaatttcagaatccgcaatcccattcccacacagagcaggtattatgtatgaactgtggtatactgcctcatgggagaaacaagaagataacgaaaaacacattaattgggtccgtagcgtctacaatttcactacaccatatgtatccaaaaacccgagattggcttacttgaattatagagacttggatctaggaaaaaataatgaagaaagcccgaataattatacacaggcaaggatttggggcgagaagtatttcggcaagaacttcaacagattagtaaaagttaagaccaaagttgaccccaataacttttttagaaatgaacaaagtatccctccactcccaccacatcatcat

SEQ ID NO: 1040 - DNA, 1548 bp, Artificial Sequence
  Synthetic
aatccaagagaaaatttcttgaagtgtttttctcagtatatcccgaataatgcgacgaaccttaagttagtatacactcagaacaaccctctatatatgagcgttctaaattctacaatccacaacctaagatttacgtccgacacgactccgaaacccctagttatagtgacaccgtcacatgttagccatatacaggcaaccatactatgttccaaaaaagttgggttacaaatacgtacccgtagcgggggacacgacagtgaggggatgagttatattagtcaggtgcctttcgtcatagtggatttaagaaatatgaggtcaattaaaatcgacgttcactcacaaactgcctgggttgaggcgggggccacattgggtgaagtatattactgggtcaatgagaagaacgagaatctttcactagcagccggttattgtcccacagtctgcgccggcggtcactttggcggcggcggatacggtcccttaatgagaaaatacgggcttgccgcagacaatatcatagatgctcacttagttaatgttcatggaaaagtgttagaccgtaaaagcatgggggaggatctgttttgggcgcttagagggggaggggcagaatcatttggaataatagtggcatggaaaatcaggcttgtggctgttccaaagagtaccatgttctcagtaaagaaaataatggagatccatgagctagttaaacttgtgaataaatggcaaaacatagcctataaatatgataaggacttgctgcttatgactcatttcataaccagaaacattacggataaccaagggaagaacaaaacagccatccatacctactttagctccgttttcttgggtggtgtagacagcttagttgacctgatgaacaagagttttccggaactaggtatcaagaaggaagattgtagagaactttcctggattgataccataatcttttacagcggagtcgtcaattatgacactgacaacttcaacaaggaaattttattagataggagtgcgggtcaaaatggggccttcaagatcaaactagactacgttaaaaaacccattcctgaaagtgtttttgttcagattctggagaagctgtatgaagaagatattggcgcgggtatgtacgtactttatccgtacggcggcataatggatgagattagtgaaagcgccatccctttcccccacagagctggtatcctgtacgagttgtggtatatctgctcctgggagaaacaggaggataacgaaaagcacttaaattggattaggaatatctacaatttcatgacgccctacgtttccaagaaccccaggttggcctatttgaactacagggatcttgatattggaatcaacgaccccaaaaacccaaacaactacacccaggcaaggatttggggagagaagtacttcgggaagaacttcgacaggctagttaaggtgaaaacgctagttgatccaaataattttttcagaaacgaacagagtatccctcccttaccgcgtcataggcac

SEQ ID NO: 1041 - DNA, 1551 bp, Artificial Sequence
  Synthetic
aatcccagggagaactttcttaagtgtttcagtaaacatatcccaaataacgtggcgaatccgaaattagtatacacgcaaaacgatagcctatattctagcattctgaatagtaccattcaaaacttgcgctttatatcggacacaactccaaagcctttagtcatagttactccttcaaatgtttcccatattcaggctacaatcctctgctctaaaaaagttgggttgcaaatacgtactagatcaggaggccacgatgccgaaggtatgtcttatatctcccaagtgccattcgttgtcgtcgacttgaggaacatgcattctattaagattgatgtacactcccagaccgcatgggttgaagctggtgccacattaggtgaagtatactattggataaacgagaaaaatgaaaatttatcgtttcctggaggctattgtccaactgttggtgtcggtggtcatttctcaggcgggggctacggagcattgatgcgaaactacggactagcagctgataacattatagacgcccatctcgtgaatgtggatggtaaagttcttgatagaaagagcatgggtgaagatttgttttgggcgatcagaggcggtggaggggaaaactttggtattattgcggcttggaaaataaagctggtcgatgttccctcgaaagtaacaatcttttctgtaaagaaaaatatggaaatacatgggttggtcaagttattcaataaatggcaaaacattgcttataagtatgataaagacctcgttctgatgactcattttattacgaaaaatattaccgacaatcacggtaagaataaaactacagtgcacggttacttttcttcaattttccatggtggcgttgactctctagtagatttaatgaacaaaagtttccctgagttagggatcaagaaagaggattgtaaagaactatcttggatcgacacaaccatattctattcgggtgttgttaactttaataccgcaaactttaaaaaggaaattttgttagatcgctctgctggaaagaaaacagcatttagtatcaaacttgactatgtaaagaaaccgatacccgagactgccatggttaagatacttgagaagctatacgaagaggatgtgggagctggcatgtacgttctctacccttacggcggtataatggaagaaatttcagaatccgcaatcccattcccacacagagcaggtattatgtatgaactgtggtatactgcctcatgggagaaacaagaagataacgaaaaacacattaattgggtccgtagcgtctacaatttcactacaccatatgtatccaagaacccgagattggcttacttgaattatagagacttggatctaggaaaaaataatcatgaaagcccgaataattatacacaggcaaggatttggggcgagaagtatttcggcaagaacttcaacagattagtaaaagttaagaccaaagttgaccccaataacttttttagaaatgaacaaagtatccctccactcccaccacatcatcat

SEQ ID NO: 1042 - DNA, 1548 bp, Artificial Sequence
  Synthetic
aatccaagagaaaatttcttgaagtgtttttctcagtatatcccgaataatgcgacgaaccttaagttagtatacactcagaacaaccctctatatatgagcgttctaaattctacaatccacaacctaagatttacgtccgacacgactccgaaacccctagttatagtgacaccgtcacatgttagccatatacaggccaccatactatgttccaaaaaagttgggttacaaatacgtacccgtagcgggggacacgacagtgaggggatgagttatattagtcaggtgcctttcgtcatagtggatttaagaaatatgaggtcaattaaaatcgacgttcactcacaaactgcctgggttcaagcgggggccacattgggtgaagtatattactggattaatgagaagaacgagaatctttcactagcagccggttattgtcccacagtcggagccggcggtcactttggcggcggcggatacggtcccttaatgagaaaatacgggcttgccgcagacaatatcatagatgctcacttagttgatgttcatggaaaagtgttagaccgtaaaagcatgggggaggatctgttttgggcgcttagagggggaggggcagaatcatttggaataatagtggcatggaaaatcaggcttgtggctgttccaaagagtaccatgttctcagtaaagaaaataatggagatccatgagctagttaaacttgtgcataaatggcaaaacatagcctataaatatgataaggacttgctgcttatgactcatttcataaccagaaacattacggataaccaagggaagaacaaaacagccatccatacctactttagctccgttttcttgggtggtgtagacagcttagttgacctgatgaacaagagttttccggaactaggtatcaagaaggaagattgtagagaactttcctggattgataccataatcttttacagcggagtcgtcaattatgacactgacaacttcaacaaggaaattttattagataggagtgcgggtcaaaatggggccttcaagatcaaactagactacgttaaaaaacccattcctgaaagtgtttttgttcagattctggagaagctgtatgaagaagatattggtgcgggtatgtacgtactttatccgtacggcggcataatggatgagattagtgaaagcgccatccctttcccccacagagctggtatcctgtacgagttgtggtatatctgctcctgggagaaacaggaggataacgaaaagcacttaaattggattaggaatatctacaatttcatgacgccctacgtttccaagaaccccaggttggcctatttgaactacagggatcttgatattggaatcaacgaccccaaaaacccaaacaactacacccaggcaaggatttggggagagaagtacttcgggaagaacttcgacaggctagttaaggtgaaaacgctagttgatccaaataattttttcagaaacgaacagagtatccctcccttaccgcgtcataggcac

SEQ ID NO: 1043 - DNA, 1551 bp, Artificial Sequence
  Synthetic
aatccccaggagaactttcttaagtgtttcagtaaacatatcccaaataacgtggcgaatccgaaattagtatacacgcaaaacgatcagctatatatgagcattctgaatagtaccattcaaaacttgcgctttacttcggacacaactccaaagcctttagtcatagttactccttcaaatgtttcccatattcaggctacaatcctctgctctaaaaaagttgggttgcaaatacgtactagatcaggaggccacgatgccgaaggtatgtcttatatctcccaagtgccattcgttgtcgtcgacttgaggaacatgcattctattaagattgatgtacactcccagaccgcatgggttgaagctggtgccacattaggtgaagtatactattggataaacgagaaaaatgaaaatttatcgtttcctggaggctattgtccaactgttggtgtcggtggtcatttctcaggcgggggctacggagcattgatgcgaaactacggactagcagctgataacattatagacgcccatctcgtgaatgtggatggtaaagttcttgatagaaagagcatgggtgaagatttgttttgggcgatcagaggcggtggaggggaaaactttggtattattgcggcttggaaaataaagctggtcccggttccctcgaaagtaacaatcttttctgtaaagaaaaatatggaaatacatgggttggtcaagttattcaataaatggcaaaacattgcttataagtatgataaagacctcgttctgatgactcattttattacgaaaaatattaccgacaatcacggtaagaataaaactacagtgcacggttacttttcttcaattttccatggtggcgttgactctctagtagatttaatgaacaaaagtttccctgagttagggatcaagaaagaagattgtaaagaattgtcttggatcgacacaaccatattctattcgggtgttgttaactttaataccgcaaactttaaaaaggaaattttgttagatcgctctgctggaaagaaaacagcatttagtatcaaacttgactatgtaaagaaaccgatacccgagactgccatggttaagatacttgagaagctatacgaagaggatgtgggagctggcatgtacgttctctacccttacggcggtataatggaagaaatttcagaatccgcaatcccattcccacacagagcaggtattatgtatgaactgtggtatactgcctcatgggagaaacaagaagataacgaaaaacacattaattgggtccgtagcgtctacaatttcactacaccatatgtatccaagaacccgagattggcttacttgaattatagagacttggatctaggaaaaaataatgaggagagcccgaataattatacacaggcaaggatttggggcgagaagtatttcggcaagaacttcaacagattagtaaaagttaagaccaaagttgaccccaataacttttttagaaatgaacaaagtatccctccactcccaccacatcatcat

SEQ ID NO: 1044 - DNA, 1551 bp, Artificial Sequence
  Synthetic
aatccccaggagaactttcttaagtgtttcagtaaacatatcccaaataacgtggcgaatccgaaattagtatacacgcaaaacgatagcctatattcgagcattctgaatagtaccattcaaaacttgcgctttacttcggacacaactccaaagcctttagtcatagttactccttcaaatgtttcccatattcaggctacaatcctctgctctaaaaaagttgggttgcaaatacgtactagatcaggaggccacgatgccgaaggtatgtcttatatctcccaagtgccattcgttgtcgtcgacttgaggaacatgcattctattaagattgatgtagaatcccagaccgcatgggttgaagctggtgccacattaggtgaagtatactattggataaacgagaaaaatgaaaatttatcgtttcctggaggctattgtccaactgttggtgtcggtggtcatttctcaggcgggggctacggagcattgatgcgaaactacggactagcagctgataacattatagacgcccatctcgtgaatgtggatggtaaagttcttgatagaaagagcatgggtgaagatttgttttgggcgatcagaggcggtggaggggaaaactttggtattattgcggcttggaaaataaagctggtccctgttccctcgaaagtaacaatcttttctgtaaagaaaaatatggaaatacatgggttggtcaagttattcaataaatggcaaaacattgcttataagtatgataaagacctcgttctgatgactcattttattacgaaaaatattaccgacaatcacggtaagaataaaactacagtgcacggttacttttcttcaattttccatggtggcgttgactctctagtagatttaatgaacaaaagtttccctgagttagggatcaagaaaacggattgtaaagaattttcttggatcgacacaaccatattctattcgggtgttgttaactttaataccgcaaactttaaaaaggaaattttgttagatcgctctgctggaaagaaaacagcatttagtatcaaacttgactatgtaaagaaaccgatacccgagactgccatggttaagatacttgagaagctatacgaagaggatgtgggagctggcatgtacgttctctacccttacggcggtataatggaagaaatttcagaatccgcaatcccattcccacacagagcaggtattatgtatgaactgtggtatactgcctcatgggagaaacaagaagataacgaaaaacacattaattgggtccgtagcgtctacaatttcactacaccatatgtatccaagaacccgagattggcttacttgaattatagagacttggatctaggaaaaaataatgaagagagcccgaataattatacacaggcaaggatttggggcgagaagtatttcggcaagaacttcaacagattagtaaaagttaagaccaaagttgaccccaataacttttttagaaatgaacaaagtatccctccactcccaccacatcatcat

SEQ ID NO: 1045 - DNA, 1551 bp, Artificial Sequence
  Synthetic
aatccccaggagaactttcttaagtgtttcagtaaacatatcccaaataacgtggcgaatccgaaattagtatacacgcaaaacgatcagctatattctagcattctgaatagtaccattcaaaacttgcgctttacttcggacacaactccaaagcctttagtcatagttactccttcaaatgtttcccatattcaggctacaatcctctgctctaaaaaagttgggttgcaaatacgtactagatcaggaggccacgatgccgaaggtatgtcttatatctcccaagtgccattcgttgtcgtcgacttgaggaacatgcattctattaagattgatgtagaatcccagaccgcatgggttgaagctggtgccacattaggtgaagtatactattggataaacgagaaaaatgaaaatttatcgtttcctggaggctattgtccaactgttggtgtcggtggtcatttctcaggcgggggctacggagcattgatgcgaaactacggactagcagctgataacattatagacgcccatctcgtgaatgtggatggtaaagttcttgatagaaagagcatgggtgaagatttgttttgggcgatcagaggcggtggaggggaaaactttggtattattgcggcttggaaaataaagctggtccccgttccctcgaaagtcacaatcttttctgtaaagaaaaatatggaaatacatgggttggtcaagttattcaataaatggcaaaacattgcttataagtatgataaagacctcctgctgatgactcattttattacgaaaaatattaccgacaatcacggtaagaataaaactacagtgcacggttacttttcttcaattttccatggtggcgttgactctctagtagatttaatgaacaaaagtttccctgagttagggatcaagaaaacggattgtaaagaactatcttggatcgacacaaccatattctattcgggtgttgttaactttaataccgcaaactttaaaaaggaaattttgttagatcgctctgctggaaagaaaacagcatttagtatcaaacttgactatgtaaagaaaccgatacccgagactgccatggttaagatacttgagaagctatacgaagaggatgtgggagctggcatgtacgttctctacccttacggcggtataatggatgaaatttcagaatccgcaatcccattcccacacagagcaggtattatgtatgaactgtggtatactgcctcatgggagaaacaagaagataacgaaaaacacattaattgggtccgtagcgtctacaatttcactacaccatatgtatccaaaaacccgagattggcttacttgaattatagagacttggatctaggaaaaaataatgaggagagcccgaataattatacacaggcaaggatttggggcgagaagtatttcggcaagaacttcaacagattagtaaaagttaagaccaaagttgaccccaataacttttttagaaatgaacaaagtatccctccactcccaccacatcatcat

SEQ ID NO: 1046 - DNA, 1548 bp, Artificial Sequence
  Synthetic
aatccaagagaaaatttcttgaagtgtttttctcagtatatcccgaataatgcgacgaaccttaagttagtatacactcagaacaaccctctatatatgagcgttctaaattctacaatccacaacctaagatttacgtccgacacgactccgaaacccctagttatagtgacaccgtcacatgttagccatatacaggcaaccatactatgttccaaaaaagttgggttacaaatacgtacccgtagcgggggacacgacgctgaggggatgagttatattagtcaggtgcctttcgtcatagtggatttaagaaatatgaggtcaattaaaatcgacgttcactcacaaactgcctgggttgaggcgggggccacattgggtgaagtatattactgggtcaatgagaagaacgagaatctttcactagcagccggttattgtcccacagtctgcgccggcggtcactttggcggcggcggatacggtcccttaatgagaaattacgggcttgccgcagacaatatcatagatgctcacttagttaatgttcatggaaaagtgttagaccgtaaaagcatgggggaggatctgttttgggcgcttagagggggaggggcagaatcatttggaataatagtggcatggaaaatcaggcttgtggctgttccaaagagtaccatgttctcagtaaagaaaataatggagatccatgagctagttaaacttgtgaataaatggcaaaacatagcctataaatatgataaggacttgctgcttatgactcatttcataaccagaaacattacggataaccaagggaagaacaaaacagccatccatacctactttagctccgttttcttgggtggtgtagacagcttagttgacctgatgaacaagagttttccggaactaggtatcaagaaggaagattgtagagaactttcctggattgataccataatcttttacagcggagtcgtcaattatgacactgacaacttcaacaaggaaattttattagataggagtgcgggtcaaaatggggccttcaagatcaaactagactacgttaaaaaacccattcctgaaagtgtttttgttcagattctggagaagctgtatgaagaagatattggagcgggtatgtacgtactttatccgtacggcggcataatggatgagattagtgaaagcgccatccctttcccccacagagctggtatcctgtacgagttgtggtatatctgctcctgggagaaacaggaggataacgaaaagcacttaaattggattaggaatatctacaatttcatgacgccctacgtttccaagaaccccaggttggcctatttgaactacagggatcttgatattggaatcaacgaccccaaaaacccaaacaactacacccaggcaaggatttggggagagaagtacttcgggaagaacttcgacaggctagttaaggtgaaaacgctagttgatccagataattttttcagaaacgaacagagtatccctcccttaccgcgtcataggcac

SEQ ID NO: 1047 - DNA, 1548 bp, Artificial Sequence
  Synthetic
aatccaagagaaaatttcttgaagtgtttttctcagtatatcccgaataatgcgacgaaccttaagttagtatacactcagaacaaccctctatatatgagcgttctaaattctacaatccacaacctaagatttacgtccgacacgactccgaaacccctagttatagtgacaccgtcacatgttagccatatacaggctaccatactatgttccaaaaaagttgggttacaaatacgtacccgtagcgggggacacgacagtgaggggatgagttatattagtcaggtgcctttcgtcatagtggatttaagaaatatgaggtcaattaaaatcgacgttcactcacaaactgcctgggttgaggcgggggccacattgggtgaagtatattactgggtcaatgagaagaacgagaatctttcactagcagccggtttttgtcccacagtctgcgccggcggtcactttggcggcggcggatacggtcccttaatgagaaattacgggcttgccgcagacaatatcatagatgctcacttagttaatgttcatggaaaagtgttagaccgtaaaagcatgggggaggatctgttttgggcgcttagagggggaggggcagaatcatttggaataatagtggcatggaaaatcaggcttgtggctgttccaaagagtaccatgttctcagtaaagaaaataatggagatccatgagctagttaaacttgtgaataaatggcaaaacatagcctataaatatgataaggacttgctgcttatgactcatttcataaccagaaacattacggataaccaagggaagaacaaaacagccatccatacctactttagctccgttttcttgggtggtgtagacagcttagttgacctgatgaacaagagttttccggaactaggtatcaagaaggaagattgtagagaactttcctggattgataccataatcttttacagcggagtcgtcaattatgacactgacaacttcaacaaggaaattttattagataggagtgcgggtcaaaatggggccttcaagatcaaactagactacgttaaaaaacccattcctgaaagtgtttttgttcagattctggagaagctgtatgaagaagatattggcgcgggtatgtacgtactttatccgtacggcggcataatggatgagattagtgaaagcgccatccctttcccccacagagctggtatcctgtacgagttgtggtatatctgctcctgggagaaacaggaggataacgaaaagcacttaaattggattaggaatatctacaatttcatgacgccctacgtttccaagaaccccaggttggcctatttgaactacagggatcttgatattggaatcaacgaccccaaaaacccaaacaactacacccaggcaaggatttggggagagaagtacttcgggaagaacttcgacaggctagttaaggtgaaaacgctagttgatccaaataattttttcagaaacgaacagagtatccctcccttaccgcgtcataggcac

SEQ ID NO: 1048 - DNA, 1548 bp, Artificial Sequence
  Synthetic
aatccaagagaaaatttcttgaagtgtttttctcagtatatcccgaataatgcgacgaaccttaagttagtatacactcagaacaaccctctatatatgagcgttctaaattctacaatccacaacctaagatttacgtccgacacgactccgaaacccctagttatagtgacaccgtcacatgttagccatatacaggctaccatactatgttccaaaaaagttgggttacaaatacgtacccgtagcgggggacacgacagtgaggggatgagttatattagtcaggtgcctttcgtcatagtggatttaagaaatatgaggtcaattaaaatcgacgttcactcacaaactgcctgggttgaggcgggggccacattgggtgaagtatattactgggtcaatgagaagaacgagaatctttcactagcagccggttattgtcccacagtctgcgccggcggtcactttggcggcggcggatacggtcccttaatgagaaattacgggcttgccgcagacaatatcatagatgctcacttagttaatgttaacggaaaagtgttagaccgtaaaagcatgggggaggatctgttttgggcgcttagagggggaggggcagaatcatttggaataatagtggcatggaaaatcaggcttgtggctgttccaaagagtaccatgttctcagtaaagaaaataatggagatccatgagctagttaaacttgtgaataaatggcaaaacatagcctataaatatgataaggacttgctgcttatgactcatttcataaccagaaacattacggataaccaagggaagaacaaaacagccatccatacctactttagctccgttttcttgggtggtgtagacagcttagttgacctgatgaacaagagttttccggaactaggtatcaagaaggaagattgtagagaaatgtcctggattgataccataatcttttacagcggagtcgtcaattatgacactgacaacttcaacaaggaaattttattagataggagtgcgggtcaaaatggggccttcaagatcaaactagactacgttaaaaaacccattcctgaaagtgtttttgttcagattctggagaagctgtatgaagaagatattggcgcgggtatgtacgtactttatccgtacggcggcataatggatgagattagtgaaagcgccatccctttcccccacagagctggtatcctgtacgagttgtggtatatctgctcctgggagaaacaggaggataacgaaaagcacttaaattggattaggaatatctacaatttcatgacgccctacgtttccaagaaccccaggttggcctatttgaactacagggatcttgatattggaatcaacgaccccaaaaacccaaacaactacacccaggcaaggatttggggagagaagtacttcgggaagaacttcgacaggctagttaaggtgaaaacgctagttgatccagataattttttcagaaacgaacagagtatccctcccttaccgcgtcataggcac

SEQ ID NO: 1049 - DNA, 1551 bp, Artificial Sequence
  Synthetic
aatccccaggagaactttcttaagtgtttcagtaaacatatcccaaataacgtggcgaatccgaaattaatttacacgcaaaatgatcagctatattcaagcattctgaatagtaccattcaaaacttgcgctttacttcggacacaactccaaagcctttagtcatagttactccttcaaatgtttcccatattcaggctacaatcctctgctctaaaaaagttgggttgcaaatacgtactagatcaggaggccacgatgccgaaggtatgtcttatatctcccaagtgccattcgttgtcgtcgacttgaggaacatgcattctattaagattgatgtacactcccagaccgcatgggttgaagctggtgccacattaggtgaagtatactattggataaacgagaaaaatgaaaatttatcgtttcctggaggctattgtccaactgttggtgtcggtggtcatttctcaggcgggggctacggagcattgatgcgaaactacggactagcagctgataacattatagacgcccatctcgtgaatgtggatggtaaagttcttgatagaaagagcatgggtgaagatttgttttgggcgatcagaggcggtggaggggaaaactttggtattattgcggcttggaaaataaagctggtccccgttccctcgaaagtaacaatcttttctgtaaagaaaaatatggaaatacatgggttggtcaagttattcaataaatggcaaaacattgcttataagtatgataaagacctcgttctgatgactcattttattacgaaaaatattaccgacaatcacggtaagaataaaactacagtgcacggttacttttcttcaattttccatggtggcgttgactctctagtagatttaatgaacaaaagtttccctgagttagggatcaagaaaacggattgtaaagaattttcttggatcgacacaaccatattctattcgggtgttgttaactttaataccgcaaactttaaaaaggaaattttgttagatcgctctgctggaaagaaaacagcatttagtatcaaacttgactatgtaaagaaaccgatacccgagactgccatggttaagatacttgagaagctatacgaagaggatgtgggagctggcatgtacgttctctacccttacggcggtataatggaagaaatttcagaatccgcaatcccattcccacacagagcaggtattatgtatgaactgtggtatactgcctcatgggagaaacaagaagataacgaaaaacacattaattgggtccgtagcgtctacaatttcactacaccatatgtatccaagaacccgagattggcttacttgaattatagagacttggatctaggaaaaaataatgaagaaagcccgaataattatacacaggcaaggatttggggcgagaagtatttcggcaagaacttcaacagattagtaaaagttaagaccaaagttgaccccaataacttttttagaaatgaacaaagtatccctccactcccaccacatcatcat

SEQ ID NO: 1050 - DNA, 1548 bp, Artificial Sequence
  Synthetic
aatccaagagaaaatttcttgaagtgtttttctcagtatatcccgaataatgcgacgaaccttaagttagtatacactcagaacaaccctctatatatgagcgttctaaattctacaatccacaacctaagatttacgtccgacacgactccgaaacccctagttatagtgacaccgtcacatgttagccatatacaggctaccatactatgttccaaaaaagttgggttacaaatacgtacccgtagcgggggacacgacgcagaggggatgagttatattagtcaggtgcctttcgtcatagtggatttaagaaatatgaggtcaattaaaatcgacgttcactcacaaactgcctgggttgaggcgggggccacattgggtgaagtatattactgggtcaatgagaagaacgagaatctttcactagcagccggttattgtcccacagtctgcgccggcggtcactttggcggcggcggatacggtcccttaatgagaaattacgggcttgccgcagacaatatcatagatgctcacttagttaatgttcatggaaaagtgttagaccgtaaaagcatgggggaggatctgttttgggcgcttagagggggaggggcagaatcatttggaataatagtggcatggaaaatcaggcttgtggctgttccaaagagtaccatgttctcagtaaagaaaataatggagatccatgagctagttaaacttgtgaataaatggcaaaacatagcctataaatatgataaggacttgctgcttatgactcatttcataaccagaaacattacggataaccaagggaagaacaaaacagccatccatacctactttagctccgttttcttgggtggtgtagacagcttagttgacctgatgaacaagagttttccggaactaggtatcaagaaggaagattgtagagaaatgtcctggattgataccataatcttttacagcggagtcgtcaattatgacactgacaacttcaacaaggaaattttattagataggagtgcgggtcaaaatggggccttcaagatcaaactagactacgttaaaaaacccattcctgaaagtgtttttgttcagattctggagaagctgtatgaagaagatattggtgcgggcatgtacgtactttatccgtacggcggcataatggatgagattagtgaaagcgccatccctttcccccacagagctggtatcctgtacgagttgtggtatatctgctcctgggagaaacaggaggataacgaaaagcacttaaattggattaggaatatctacaatttcatgacgccctacgtttccaagaaccccaggttggcctatttgaactacagggatcttgatattggaatcaacgaccccaaaaacccaaacaactacacccaggcaaggatttggggagagaagtacttcgggaagaacttcgacaggctagttaaggtgaaaacgctagttgatccagataattttttcagaaacgaacagagtatccctcccttaccgcgtcataggcac

SEQ ID NO: 1051 - DNA, 1548 bp, Artificial Sequence
  Synthetic
aatccaagagaaaatttcttgaagtgtttttctcagtatatcccgaataatgcgacgaaccttaagttagtatacactcagaacaaccctctatatatgagcgttctaaattctacaatccacaacctaagatttacgtccgacacgactccgaaacccctagttatagtgacaccgtcacatgttagccatatacagggcaccatactatgttccaaaaaagttgggttacaaatacgtacccgtagcgggggacacgacgcagaggggatgagttatattagtcaggtgcctttcgtcatagtggatttaagaaatatgaggtcaattaaaatcgacgttcactcacaaactgcctgggttgaggcgggggccacattgggtgaagtatattactgggtcaatgagaagaacgagaatctttcactagcagccggttattgtcccacagtctgcgccggcggtcactttggcggcggcggatacggtcccttaatgagaaattacgggcttgccgcagacaatatcatagatgctcacttagttaatgttaatggaaaagtgttagaccgtaaaagcatgggggaggatctgttttgggcgcttagagggggaggggcagaatcatttggaataatagtggcatggaaaatcaggcttgtggctgttccaaagagtaccatgttctcagtaaagaaaataatggagatccatgagctagttaaacttgtgaataaatggcaaaacatagcctataaatatgataaggacttgctgcttatgactcatttcataaccagaaacattacggataaccaagggaagaacaaaacagccatccatacctactttagctccgttttcttgggtggtgtagacagcttagttgacctgatgaacaagagttttccggaactaggtatcaagaaggaagattgtagagaaatgtcctggattgataccataatcttttacagcggagtcgtcaattatgacactgacaacttcaacaaggaaattttattagataggagtgcgggtcaaaatggggccttcaagatcaaactagactacgttaaaaaacccattcctgaaagtgtttttgttcagattctggagaagctgtatgaagaagatattggtgcgggtatgtacgctctttatccgtacggcggcataatggatgagattagtgaaagcgccatccctttcccccacagagctggtatcctgtacgagttgtggtatatctgctcctgggagaaacaggaggataacgaaaagcacttaaattggattaggaatatctacaatttcatgacgccctacgtttccaagaaccccaggttggcctatttgaactacagggatcttgatattggaatcaacgaccccaaaaacccaaacaactacacccaggcaaggatttggggagagaagtacttcgggaagaacttcgacaggctagttaaggtgaaaacgctagttgatccagataattttttcagaaacgaacagagtatccctcccttaccgcgtcataggcac

SEQ ID NO: 1052 - DNA, 1551 bp, Artificial Sequence
  Synthetic
aatccccaagagaactttcttaagtgtttcagtaaacatatcccaaataacgtggcgaatgctaaattagtatacacgcaaaacgattccctatattctagcattctgaatagtaccattcaaaacttgcgctttacttcggacacaactccaaagcctttagtcatagttactccttcaaatgtttcccatattcaggctacaatcctctgctctaaaaaagttgggttgcaaatacgtactagatcaggaggccacgatgccgaaggtatgtcttatatctcccaagtgccattcgttgtcgtcgacttgaggaacatgcattctattaagattgatgtacactcccagaccgcatgggttgaagctggtgccacattaggtgaagtatactattggataaacgagaaaaatgaaaatttatcgtttcctggaggctattgtccaactgttggtgtcggtggtcatttctcaggcgggggctacggagcattgatgcgaaactacggactagcagctgataacattatagacgcccatctcgtgaatgtggatggtaaagttcttgatagaaagagcatgggtgaagatttgttttgggcgatcagaggcggtggaggggaaaactttggtattattgcggcttggaaaataaagctggtcccggttccctcgaaagtaacaatcttttctgtaaagaaaaatatggaaatacatgggttggtcaagttattcaataaatggcaaaacattgcttataagtatgataaagacctcctactgatgactcattttattacgaaaaatattaccgacaatcacggtaagaataaaactacagtgcacggttacttttcttcaattttccatggtggcgttgactctctagtagatttaatgaacaaaagtttccctgagttagggatcaagaaaacggattgtaaagaattatcttggatcgacacaaccatattctattcgggtgttgttaactttaataccgcaaactttaaaaaggaaattttgttagatcgctctgctggaaagaaaacagcatttagtatcaaacttgactatgtaaagaaaccgatacccgagactgccatggttaagatacttgagaagctatacgaagaggatgtgggagctggcatgtacgttctctacccttacggcggtataatggatgaaatttcagaatccgcaatcccattcccacacagagcaggtattatgtatgaactgtggtatactgcctcatgggagaaacaagaagataacgaaaaacacattaattgggtccgtagcgtctacaatttcactacaccatatgtatccaagaacccgagattggcttacttgaattatagagacttggatctaggaaaaaataatgaggaaagcccgaataattatacacaggcaaggatttggggcgagaagtatttcggcaagaacttcaacagattagtaaaagttaagaccaaagttgaccccaataacttttttagaaatgaacaaagtatccctccactcccaccacatcatcat

SEQ ID NO: 1053 - DNA, 1551 bp, Artificial Sequence
  Synthetic
aatcccagggagaactttcttaagtgtttcagtaaacatatcccaaataacgtggcgaatgcaaaattagtatacacgcaaaacgattcactatattccagcattctgaatagtaccattcaaaacttgcgctttacttcggacacaactccaaagcctttagtcatagttactccttcaaatgtttcccatattcaggctacaatcctctgctctaaaaaagttgggttgcaaatacgtactagatcaggaggccacgatgccgaaggtatgtcttatatctcccaagtgccattcgttgtcgtcgacttgaggaacatgcattctattaagattgatgtagaatcccagaccgcatgggttgaagctggtgccacattaggtgaagtatactattggataaacgagaaaaatgaaaatttatcgtttcctggaggctattgtccaactgttggtgtcggtggtcatttctcaggcgggggctacggagcattgatgcgaaactacggactagcagctgataacattatagacgcccatctcgtgaatgtggatggtaaagttcttgatagaaagagcatgggtgaagatttgttttgggcgatcagaggcggtggaggggaaaactttggtattattgcggcttggaaaataaagctggtcgacgttccctcgaaagtaacaatcttttctgtaaagaaaaatatggaaatacatgggttggtcaagttattcaataaatggcaaaacattgcttataagtatgataaagacctcgttctgatgactcattttattacgaaaaatattaccgacaatcacggtaagaataaaactacagtgcacggttacttttcttcaattttccatggtggcgttgactctctagtagatttaatgaacaaaagtttccctgagttagggatcaagaaagaggattgtaaagaattgtcttggatcgacacaaccatattctattcgggtgttgttaactttaataccgcaaactttaaaaaggaaattttgttagatcgctctgctggaaagaaaacagcatttagtatcaaacttgactatgtaaagaaaccgatacccgagactgccatggttaagatacttgagaagctatacgaagaggatgtgggagctggcatgtacgttctctacccttacggcggtataatggaagaaatttcagaatccgcaatcccattcccacacagagcaggtattatgtatgaactgtggtatactgcctcatgggagaaacaagaagataacgaaaaacacattaattgggtccgtagcgtctacaatttcactacaccatatgtatccaaaaacccgagattggcttacttgaattatagagacttggatctaggaaaaaataatgaagagagcccgaataattatacacaggcaaggatttggggcgagaagtatttcggcaagaacttcaacagattagtaaaagttaagaccaaagttgaccccaataacttttttagaaatgaacaaagtatccctccactcccaccacatcatcat

SEQ ID NO: 1054 - DNA, 1548 bp, Artificial Sequence
  Synthetic
aatccaagagaaaatttcttgaagtgtttttctcagtatatcccgaataatgcgacgaaccttaagttagtatacactcagaacaaccctctatatatgagcgttctaaattctacaatccacaacctaagatttacgtccgacacgactccgaaacccctagttatagtgacaccgtcacatgttagccatatacaggccaccatactatgttccaaaaaagttgggttacaaatacgtacccgtagcgggggacacgacgctgaggggatgagttatattagtcaggtgcctttcgtcatagtggatttaagaaatatgaggtcaattaaaatcgacgttcactcacaaactgcctgggttgaggcgggggccacattgggtgaagtatattactgggtcaatgagaagaacgagaatctttcactagcagccggttattgtcccacagtctgcgccggcggtcactttggcggcggcggatacggtcccttaatgagaaattacgggcttgccgcagacaatatcatagatgctcacttagttaatgttaacggaaaagtgttagaccgtaaaagcatgggggaggatctgttttgggcgcttagagggggaggggcagaatcatttggaataatagtggcatggaaaatcaggcttgtggctgttccaaagagtaccatgttctcagtaaagaaaataatggagatccatgagctagttaaacttgtgaataaatggcaaaacatagcctataaatatgataaggacttgctgcttatgactcatttcataaccagaaacattacggataaccaagggaagaacaaaacagccatccatacctactttagctccgttttcttgggtggtgtagacagcttagttgacctgatgaacaagagttttccggaactaggtatcaagaaggaagattgtagagaaatgtcctggattgataccataatcttttacagcggagtcgtcaattatgacactgacaacttcaacaaggaaattttattagataggagtgcgggtcaaaatggggccttcaagatcaaactagactacgttaaaaaacccattcctgaaagtgtttttgttcagattctggagaagctgtatgaagaagatattggagcgggtatgtacgtactttatccgtacggcggcataatggatgagattagtgaaagcgccatccctttcccccacagagctggtatcctgtacgagttgtggtatatctgctcctgggagaaacaggaggataacgaaaagcacttaaattggattaggaatatctacaatttcatgacgccctacgtttccaagaaccccaggttggcctatttgaactacagggatcttgatattggaatcaacgaccccaaaaacccaaacaactacacccaggcaaggatttggggagagaagtacttcgggaagaacttcgacaggctagttaaggtgaaaacgctagttgatccagataattttttcagaaacgaacagagtatccctcccttaccgcgtcataggcac

SEQ ID NO: 1055 - DNA, 1548 bp, Artificial Sequence
  Synthetic
aatccaagagaaaatttcttgaagtgtttttctcagtatatcccgaataatgcgacgaaccttaagttagtatacactcagaacaaccctctatatatgagcgttctaaattctacaatccacaacctaagatttacgtccgacacgactccgaaacccctagttatagtgacaccgtcacatgttagccatatacaggcaaccatactatgttccaaaaaagttgggttacaaatacgtacccgtagcgggggacacgacagtgaggggatgagttatattagtcaggtgcctttcgtcatagtggatttaagaaatatgaggtcaattaaaatcgacgttcactcacaaactgcctgggttgaggcgggggccacattgggtgaagtatattactgggtcaatgagaagaacgagaatctttcactagcagccggttattgtcccacagtctgcgccggcggtcactttggcggcggcggatacggtcccttaatgagaaattacgggcttgccgcagacaatatcatagatgctcacttagttaatgttcatggaaaagtgttagaccgtaaaagcatgggggaggatctgttttgggcgcttagagggggaggggcagaatcatttggaataatagtggcatggaaaatcaggcttgtggctgttccaaagagtaccatgttctcagtaaagaaaataatggagatccatgagctagttaaacttgtgaataaatggcaaaacatagcctataaatatgataaggacttgctgcttatgactcatttcataaccagaaacattacggataaccaagggaagaacaaaacagccatccatacctactttagctccgttttcttgggtggtgtagacagcttagttgacctgatgaacaagagttttccggaactaggtatcaagaaggaagattgtagagaactttcctggattgataccataatctttatgagcggagtcgtcaattatgacactgacaacttcaacaaggaaattttattagataggagtgcgggtcaaaatggggccttcaagatcaaactagactacgttaaaaaacccattcctgaaagtgtttttgttcagattctggagaagctgtatgaagaagatattggtgcgggtatgtacgtcctttatccgtacggcggcataatggatgagattagtgaaagcgccatccctttcccccacagagctggtatcctgtacgagttgtggtatatctgctcctgggagaaacaggaggataacgaaaagcacttaaattggattaggaatatctacaatttcatgacgccctacgtttccaagaaccccaggttggcctatttgaactacagggatcttgatattggaatcaacgaccccaaaaacccaaacaactacacccaggcaaggatttggggagagaagtacttcgggaagaacttcgacaggctagttaaggtgaaaacgctagttgatccaaataattttttcagaaacgaacagagtatccctcccttaccgcgtcataggcac

SEQ ID NO: 1056 - DNA, 1548 bp, Artificial Sequence
  Synthetic
aatccaagagaaaatttcttgaagtgtttttctcagtatatcccgaataatgcgacgaaccttaacttagtatacactcagaacaaccctctatatatgagcgttctaaattctacaatccacaacctaagatttacgtccgacacgactccgaaacccctagttatagtgacaccgtcacatgttagccatatacaggccaccatactatgttccaaaaaacatgggttacaaatacgtacccgtagcgggggacacgacagtgaggggatgagttatattagtcaggtgcctttcgtcatagtggatttaagaaatatgaggtcaattaaaatcgacgttcactcacaaactgcctgggttcaagcgggggccacattgggtgaagtatattactggattaatgagaagaacgagaatctttcactagcagccggttattgtcccacagtcggtgccggcggtcactttggcggcggcggatacggtcccttaatgagaaagtacgggcttgccgcagacaatatcatagatgctcacttagttgatgttaatggaaaagtgttagaccgtaaaagcatgggggaggatctgttttgggcgcttagagggggaggggcagaatcatttggaataatagtggcatggaaaatcaggcttgtggctgttccaaagagtaccatgttctcagtaaagaaaataatggagatccatgagctagttaaacttgtgaataaatggcaaaacatagcctataaatatgataaggacttgctgcttatgactcatttcataaccagaaacattacggataaccaagggaagaacaaaacagccatccatacctactttagctccgttttcttgggtggtgtagacagcttagttgacctgatgaacaagagttttccggaactaggtatcaagaaggaagattgtagagaaatgtcctggattgataccataatcttttacagcggagtcgtcaattatgacactgacaacttcaacaaggaaattttattagataggagtgcgggtcaaaatggggccttcaagatcaaactagactacgttaaaaaacccattcctgaaagtgtttttgttcagattctggagaagctgtatgaagaagatattggcgcggggatgtacgtcctttatccgtacggcggcataatggatgagattagtgaaagcgccatccctttcccccacagagctggtatcctgtacgagttgtggtatatctgctcctgggagaaacaggaggataacgaaaagcacttaaattggattaggaatatctacaatttcatgacgccctacgtttccaagaaccccaggttggcctatttgaactacagggatcttgatattggaatcaacgaccccaaaaacccaaacaactacacccaggcaaggatttggggagagaagtacttcgggaagaacttcgacaggctagttaaggtgaaaacgctagttgatccaaataattttttcagaaacgaacagagtatccctcccttaccgcgtcataggcac

SEQ ID NO: 1057 - DNA, 1548 bp, Artificial Sequence
  Synthetic
aatccaagagaaaatttcttgaagtgtttttctcagtatatcccgaataatgcgacgaaccttaagttagtatacactcagaacaaccctctatatatgagcgttctaaattctacaatccacaacctaagatttacgtccgacacgactccgaaacccctagttatagtgacaccgtcacatgttagccatatacaggcaaccatactatgttccaaaaaagttgggttacaaatacgtacccgtagcgggggacacgacagtgaggggatgagttatattagtcaggtgcctttcgtcatagtggatttaagaaatatgaggtcaattaaaatcgacgttcactcacaaactgcctgggttgaggcgggggccacattgggtgaagtatattactgggtcaatgagaagaacgagaatctttcactagcagccggttattgtcccacagtctgcgccggcggtcactttggcggcggcggatacggtcccttaatgagaaattacgggcttgccgcagacaatatcatagatgctcacttagttaatgttcatggaaaagtgttagaccgtaaaagcatgggggaggatctgttttgggcgcttagagggggaggggcagaatcatttggaataatagtggcatggaaaatcaggcttgtggctgttccaaagagtaccatgttctcagtaaagaaaataatggagatccatgagctagttaaacttgtgaataaatggcaaaacatagcctataaatatgataaggacttgctgcttatgactcatttcataaccagaaacattacggataaccaagggaagaacaaaacagccatccatacctactttagctccgttttcttgggtggtgtagacagcttagttgacctgatgaacaagagttttccggaactaggtatcaagaaggaagattgtagagaactttcctggattgataccataatcttttacagcggagtcgtcaattatgacactgacaacttcaacaaggaaattttattagataggagtgcgggtcaaaatggggccttcaagatcaaactagactacgttaaaaaacccattcctgaaagtgtttttgttcagattctggagaagctgtatgaagaagatattggtgcgggtatgtacgtactttatccgtacggcggcataatggatgagattagtgaaagcgccatccctttcccccacagagctggtatcctgtacgagatttggtatatctgctcctgggagaaacaggaggataacgaaaagcacttaaattggattaggaatatctacaatttcatgacgccctacgtttccaagaaccccaggttggcctatttgaactacagggatcttgatattggaatcaacgaccccaaaaacccaaacaactacacccaggcaaggatttggggagagaagtacttcgggaagaacttcgacaggctagttaaggtgaaaacgctagttgatccaaataattttttcagaaacgaacagagtatccctcccttaccgcgtcataggcac

SEQ ID NO: 1058 - DNA, 1551 bp, Artificial Sequence
  Synthetic
aatccccaggagaactttcttcactgtttcagtaaacatatcccaaataacgtggcgaatccgaaattagtatacacgcaaaacgatcagctatatatgagcattctgaatagtaccattcaaaacttgcgctttacatcggacacaactccaaagcctttagtcatagttactccttcaaatgtttcccatattcaggctacaatcctctgctctaaaaaagttgggttgcaaatacgtactagatcaggaggccacgatgccgaaggtatgtcttatatctcccaagtgccattcgttgtcgtcgacttgaggaacatgcattctattaagattgatgtacactcccagaccgcatgggttgaagctggtgccacattaggtgaagtatactattggataaacgagaaaaatgaaaatttatcgtttcctggaggctattgtccaactgttggtgtcggtggtcatttctcaggcgggggctacggagcattgatgcgaaactacggactagcagctgataacattatagacgcccatctcgtgaatgtggatggtaaagttcttgatagaaagagcatgggtgaagatttgttttgggcgatcagaggcggtggaggggaaaactttggtattattgcggcttggaaaataaagctggtcccagttccctcgaaagtaacaatcttttctgtaaagaaaaatatggaaatacatgggttggtcaagttattcaataaatggcaaaacattgcttataagtatgataaagacctcgttctgatgactcattttattacgaaaaatattaccgacaatcacggtaagaataaaactacagtgcacggttacttttcttcaattttccatggtggcgttgactctctagtagatttaatgaacaaaagtttccctgagttagggatcaagaaaacggattgtaaagaattttcttggatcgacacaaccatattctattcgggtgttgttaactttaataccgcaaactttaaaaaggaaattttgttagatcgctctgctggaaagaaaacagcatttagtatcaaacttgactatgtaaagaaaccgatacccgagactgccatggttaagatacttgagaagctatacgaagaggatgtgggagctggcatgtacgttctctacccttacggcggtataatggaagaaatttcagaatccgcaatcccattcccacacagagcaggtattatgtatgaactgtggtatactgcctcatgggagaaacaagaagataacgaaaaacacattaattgggtccgtagcgtctacaatttcactacaccatatgtatccaagaacccgagattggcttacttgaattatagagacttggatctaggaaaaaataatgaagagagcccgaataattatacacaggcaaggatttggggcgagaagtatttcggcaagaacttcaacagattagtaaaagttaagaccaaagttgaccccaataacttttttagaaatgaacaaagtatccctccactcccaccacatcatcat

SEQ ID NO: 1059 - DNA, 1548 bp, Artificial Sequence
  Synthetic
aatccaagagaaaatttcttgaagtgtttttctcagtatatcccgaataatgcgacgaaccttaagttagtatacactcagaacaaccctctatatatgagcgttctaaattctacaatccacaacctaagatttacgtccgacacgactccgaaacccctagttatagtgacaccgtcacatgttagccatatacaggctaccatactatgttccaaaaaagttgggttacaaatacgtacccgtagcgggggacacgacagtgaggggatgagttatattagtcaggtgcctttcgtcatagtggatttaagaaatatgaggtcaattaaaatcgacgttcactcacaaactgcctgggttgaggcgggggccacattgggtgaagtatattactgggtcaatgagaagaacgagaatctttcactagcagccggttattgtcccacagtctgcgccggcggtcactttggcggcggcggatacggtcccttaatgagaaattacgggcttgccgcagacaatatcatagatgctcacttagttaatgttcatggaaaagtgttagaccgtaaaagcatgggggaggatctgttttgggcgcttagagggggaggggcagaatcatttggaataatagtggcatggaaaatcaggcttgtggctgttccaaagagtaccatgttctcagtaaagaaaataatggagatccatgagctagttaaacttgtgaataaatggcaaaacatagcctataaatatgataaggacttgctgcttatgactcatttcataaccagaaacattacggataaccaagggaagaacaaaacagccatccatacctactttagctccgttttcttgggtggtgtagacagcttagttgacctgatgaacaagagttttccggaactaggtatcaagaaggaagattgtagagaactttcctggattgataccataatcttttacagcggagtcgtcaattatgacactgacaacttcaacaaggaaattttattagataggagtgcgggtcaaaatggggcctacaagatcaaactagactacgttaaaaaacccattcctgaaagtgtttttgttcagattctggagaagctgtatgaagaagatattggtgcgggcatgtacgtcctttatccgtacggcggcataatggatgagattagtgaaagcgccatccctttcccccacagagctggtatcctgtacgagttgtggtatatctgctcctgggagaaacaggaggataacgaaaagcacttaaattggattaggaatatctacaatttcatgacgccctacgtttccaagaaccccaggttggcctatttgaactacagggatcttgatattggaatcaacgaccccaaaaacccaaacaactacacccaggcaaggatttggggagagaagtacttcgggaagaacttcgacaggctagttaaggtgaaaacgctagttgatccaaataattttttcagaaacgaacagagtatccctcccttaccgcgtcataggcac

SEQ ID NO: 1060 - DNA, 1548 bp, Artificial Sequence
  Synthetic
aatccaagagaaaatttcttgaagtgtttttctcagtatatcccgaataatgcgacgaaccttaacttagtatacactcagaacaaccctctatatatgagcgttctaaattctacaatccacaacctaagatttacgtccgacacgactccgaaacccctagttatagtgacaccgtcacatgttagccatatacaggcaaccatactatgttccaaaaaagttgggttacaaatacgtacccgtagcgggggacacgacagtgaggggatgagttatattagtcaggtgcctttcgtcatagtggatttaagaaatatgaggtcaattaaaatcgacgttcactcacaaactgcctgggttgaggcgggggccacattgggtgaagtatattactgggtcaatgagaagaacgagaatctttcactagcagccggttattgtcccacagtctgcgccggcggtcactttggcggcggcggatacggtcccttaatgagaaattacgggcttgccgcagacaatatcatagatgctcacttagttaatgttaacggaaaagtgttagaccgtaaaagcatgggggaggatctgttttgggcgcttagagggggaggggcagaatcatttggaataatagtggcatggaaaatcaggcttgtggctgttccaaagagtaccatgttctcagtaaagaaaataatggagatccatgagctagttaaacttgtgaataaatggcaaaacatagcctataaatatgataaggacttgctgcttatgactcatttcataaccagaaacattacggataaccaagggaagaacaaaacagccatccatacctactttagctccgttttcttgggtggtgtagacagcttagttgacctgatgaacaagagttttccggaactaggtatcaagaaggaagattgtagagaaatgtcctggattgataccataatcttttacagcggagtcgtcaattatgacactgacaacttcaacaaggaaattttattagataggagtgcgggtcaaaatggggccttcaagatcaaactagactacgttaaaaaacccattcctgaaagtgtttttgttcagattctggagaagctgtatgaagaagatattggcgcggggatgtacgtactttatccgtacggcggcataatggatgagattagtgaaagcgccatccctttcccccacagagctggtatcctgtacgagttgtggtatatctgctcctgggagaaacaggaggataacgaaaagcacttaaattggattaggaatatctacaatttcatgacgccctacgtttccaagaaccccaggttggcctatttgaactacagggatcttgatattggaatcaacgaccccaaaaacccaaacaactacacccaggcaaggatttggggagagaagtacttcgggaagaacttcgacaggctagttaaggtgaaaacgctagttgatccagataattttttcagaaacgaacagagtatccctcccttaccgcgtcataggcac

SEQ ID NO: 1061 - DNA, 1551 bp, Artificial Sequence
  Synthetic
aatcccagggagaactttcttaagtgtttcagtaaacatatcccaaataacgtggcgaatccgaaattagtatacacgcaacacgatcagctatattccagcattctgaatagtaccattcaaaacttgcgctttatatcggacacaactccaaagcctttagtcatagttactccttcaaatgtttcccatattcaggctacaatcctctgctctaaaaaagttgggttgcaaatacgtactagatcaggaggccacgatgccgaaggtatgtcttatatctcccaagtgccattcgttgtcgtcgacttgaggaacatgcattctattaagattgatgtacactcccagaccgcatgggttgaagctggtgccacattaggtgaagtatactattggataaacgagaaaaatgaaaatttatcgtttcctggaggctattgtccaactgttggtgtcggtggtcatttctcaggcgggggctacggagcattgatgcgaaagtacggactagcagctgataacattatagacgcccatctcgtgaatgtggatggtaaagttcttgatagaaagagcatgggtgaagatttgttttgggcgatcagaggcggtggaggggaaaactttggtattattgcggcttggaaaataaagctggtcgacgttccctcgaaagtaacaatcttttctgtaaagaaaaatatggaaatacatgggttggtcaagttattcaataaatggcaaaacattgcttataagtatgataaagacctcgttctgatgactcattttattacgaaaaatattaccgacaatcacggtaagaataaaactacagtgcacggttacttttcttcaattttccatggtggcgttgactctctagtagatttaatgaacaaaagtttccctgagttagggatcaagaaaacggattgtaaagaattttcttggatcgacacaaccatattctattcgggtgttgttaactttaataccgcaaactttaaaaaggaaattttgttagatcgctctgctggaaagaaaacagcatttagtatcaaacttgactatgtaaagaaaccgatacccgagactgccatggttaagatacttgagaagctatacgaagaggatgtgggagctggcatgtacgttctctacccttacggcggtataatggaagaaatttcagaatccgcaatcccattcccacacagagcaggtattatgtatgaactgtggtatactgcctcatgggagaaacaagaagataacgaaaaacacattaattgggtccgtagcgtctacaatttcactacaccatatgtatccaaaaacccgagattggcttacttgaattatagagacttggatctaggaaaaaataatcatgaaagcccgaataattatacacaggcaaggatttggggcgagaagtatttcggcaagaacttcaacagattagtaaaagttaagaccaaagttgaccccaataacttttttagaaatgaacaaagtatccctccactcccaccacatcatcat

SEQ ID NO: 1062 - DNA, 1548 bp, Artificial Sequence
  Synthetic
aatccaagagaaaatttcttgaagtgtttttctcagtatatcccgaataatgcgacgaaccttaagttagtatacactcagaacaaccctctatatatgagcgttctaaattctacaatccacaacctaagatttacgtccgacacgactccgaaacccctagttatagtgacaccgtcacatgttagccatatacaggctaccatactatgttccaaaaaagttgggttacaaatacgtacccgtagcgggggacacgacagtgaggggatgagttatattagtcaggtgcctttcgtcatagtggatttaagaaatatgaggtcaattaaaatcgacgttcactcacaaactgcctgggttgaggcgggggccacattgggtgaagtatattactgggtcaatgagaagaacgagaatctttcactagcagccggttattgtcccacagtctgcgccggcggtcactttggcggcggcggatacggtcccttaatgagaaattacgggcttgccgcagacaatatcatagatgctcacttagttaatgttcatggaaaagtgttagaccgtaaaagcatgggggaggatctgttttgggcgattagagggggaggggcagaatcatttggaataatagtggcatggaaaatcaggcttgtggctgttccaaagagtaccatgttctcagtaaagaaaataatggagatccatgagctagttaaacttgtgaataaatggcaaaacatagcctataaatatgataaggacttgctgcttatgactcatttcataaccagaaacattacggataaccaagggaagaacaaaacagccatccatacctactttagctccgttttcttgggtggtgtagacagcttagttgacctgatgaacaagagttttccggaactaggtatcaagaaggaagattgtagagaactttcctggattgataccataatcttttacagcggagtcgtcaattatgacactgacaacttcaacaaggaaattttattagataggagtgcgggtcaaaatggggccttcaagatcaaactagactacgttaaaaaacccattcctgaaagtgtttttgttcagattctggagaagctgtatgaagaagatattggcgcgggaatgtacgtactttatccgtacggcggcataatggatgagattagtgaaagcgccatccctttcccccacagagctggtatcctgtacgagttgtggtatatctgctcctgggagaaacaggaggataacgaaaagcacttaaattggattaggaatatctacaatttcatgacgccctacgtttccaagaaccccaggttggcctatttgaactacagggatcttgatattggaatcaacgaccccaaaaacccaaacaactacacccaggcaaggatttggggagagaagtacttcgggaagaacttcgacaggctagttaaggtgaaaacgctagttgatccaaataattttttcagaaacgaacagagtatccctcccttaccgcgtcataggcac

SEQ ID NO: 1063 - DNA, 1548 bp, Artificial Sequence
  Synthetic
aatccaagagaaaatttcttgaagtgtttttctcagtatatcccgaataatgcgacgaaccttaacttagtatacactcagaacaaccctctatatatgagcgttctaaattctacaatccacaacctaagatttacgtccgacacgactccgaaacccctagttatagtgacaccgtcacatgttagccatatacaggctaccatactatgttccaaaaaagttgggttacaaatacgtacccgtagcgggggacacgacagtgaggggatgagttatattagtcaggtgcctttcgtcatagtggatttaagaaatatgaggtcaattaaaatcgacgttcactcacaaactgcctgggttcaagcgggggccacattgggtgaagtatattactggattaatgagaagaacgagaatctttcactagcagccggttattgtcccacagtcggcgccggcggtcactttggcggcggcggatacggtcccttaatgagaaagtacgggcttgccgcagacaatatcatagatgctcacttagttgatgttaacggaaaagtgttagaccgtaaaagcatgggggaggatctgttttgggcgcttagagggggaggggcagaatcatttggaataatagtggcatggaaaatcaggcttgtggctgttccaaagagtaccatgttctcagtaaagaaaataatggagatccatgagctagttaaacttgtgaataaatggcaaaacatagcctataaatatgataaggacttgctgcttatgactcatttcataaccagaaacattacggataaccaagggaagaacaaaacagccatccatacctactttagctccgttttcttgggtggtgtagacagcttagttgacctgatgaacaagagttttccggaactaggtatcaagaaggaagattgtagagaaatgtcctggattgataccataatcttttacagcggagtcgtcaattatgacactgacaacttcaacaaggaaattttattagataggagtgcgggtcaaaatggggccttcaagatcaaactagactacgttaaaaaacccattcctgaaagtgtttttgttcagattctggagaagctgtatgaagaagatattggcgcggggatgtacgtactttatccgtacggcggcataatggatgagattagtgaaagcgccatccctttcccccacagagctggtatcctgtacgagttgtggtatatctgctcctgggagaaacaggaggataacgaaaagcacttaaattggattaggaatatctacaatttcatgacgccctacgtttccaagaaccccaggttggcctatttgaactacagggatcttgatattggaatcaacgaccccaaaaacccaaacaactacacccaggcaaggatttggggagagaagtacttcgggaagaacttcgacaggctagttaaggtgaaaacgctagttgatccaaataattttttcagaaacgaacagagtatccctcccttaccgcgtcataggcac

SEQ ID NO: 1064 - DNA, 1548 bp, Artificial Sequence
  Synthetic
aatccaagagaaaatttcttgaagtgtttttctcagtatatcccgaataatgcgacgaaccttaacttagtatacactcagaacaaccctctatatatgagcgttctaaattctacaatccacaacctaagatttacgtccgacacgactccgaaacccctagttatagtgacaccgtcacatgttagccatatacaggcaaccatactatgttccaaaaaagttgggttacaaatacgtacccgtagcgggggacacgacagtgaggggatgagttatattagtcaggtgcctttcgtcatagtggatttaagaaatatgaggtcaattaaaatcgacgttcactcacaaactgcctgggttgaggcgggggccacattgggtgaagtatattactgggtcaatgagaagaacgagaatctttcactagcagccggttattgtcccacagtctgcgccggcggtcactttggcggcggcggatacggtcccttaatgagaaattacgggcttgccgcagacaatatcatagatgctcacttagttaatgttaacggaaaagtgttagaccgtaaaagcatgggggaggatctgttttgggcgcttagagggggaggggcagaatcatttggaataatagtggcatggaaaatcaggcttgtggctgttccaaagagtaccatgttctcagtaaagaaaataatggagatccatgagctagttaaacttgtgaataaatggcaaaacatagcctataaatatgataaggacttgctgcttatgactcatttcataaccagaaacattacggataaccaagggaagaacaaaacagccatccatacctactttagctccgttttcttgggtggtgtagacagcttagttgacctgatgaacaagagttttccggaactaggtatcaagaaggaagattgtagagaaatgtcctggattgataccataatcttttacagcggagtcgtcaattatgacactgacaacttcaacaaggaaattttattagataggagtgcgggtcaaaatggggccttcaagatcaaactagactacgttaaaaaacccattcctgaaagtgtttttgttcagattctggagaagctgtatgaagaagatattggcgcggggatgtacgtgctttatccgtacggcggcataatggatgagattagtgaaagcgccatccctttcccccacagagctggtatcctgtacgagttgtggtatatcacatcctgggagaaacaggaggataacgaaaagcacttaaattggattaggaatatctacaatttcatgacgccctacgtttccaagaaccccaggttggcctatttgaactacagggatcttgatattggaatcaacgaccccaaaaacccaaacaactacacccaggcaaggatttggggagagaagtacttcgggaagaacttcgacaggctagttaaggtgaaaacgctagttgatccaaataattttttcagaaacgaacagagtatccctcccttaccgcgtcataggcac

SEQ ID NO: 1065 - DNA, 1548 bp, Artificial Sequence
  Synthetic
aatccaagagaaaatttcttgaagtgtttttctcagtatatcccgaataatgcgacgaaccttaacttagtatacactcagaacaaccctctatatatgagcgttctaaattctacaatccacaacctaagatttacgtccgacacgactccgaaacccctagttatagtgacaccgtcacatgttagccatatacaggcaaccatactatgttccaaaaaagttgggttacaaatacgtacccgtagcgggggacacgacagtgaggggatgagttatattagtcaggtgcctttcgtcatagtggatttaagaaatatgaggtcaattaaaatcgacgttcactcacaaactgcctgggttgaggcgggggccacattgggtgaagtatattactgggtcaatgagaagaacgagaatctttcactagcagccggttattgtcccacagtctgcgccggcggtcactttggcggcggcggatacggtcccttaatgagaaagtacgggcttgccgcagacaatatcatagatgctcacttagttaatgttaatggaaaagtgttagaccgtaaaagcatgggggaggatctgttttgggcgcttagagggggaggggcagaatcatttggaataatagtggcatggaaaatcaggcttgtggctgttccaaagagtaccatgttctcagtaaagaaaataatggagatccatgagctagttaaacttgtgaataaatggcaaaacatagcctataaatatgataaggacttgctgcttatgactcatttcataaccagaaacattacggataaccaagggaagaacaaaacagccatccatacctactttagctccgttttcttgggtggtgtagacagcttagttgacctgatgaacaagagttttccggaactaggtatcaagaaggaagattgtagagaaatgtcctggattgataccataatcttttacagcggagtcgtcaattatgacactgacaacttcaacaaggaaattttattagataggagtgcgggtcaaaatggggccttcaagatcaaactagactacgttaaaaaacccattcctgaaagtgtttttgttcagattctggagaagctgtatgaagaagatattggcgcggggatgtacgtactttatccgtacggcggcataatggatgagattagtgaaagcgccatccctttcccccacagagctggtatcctgtacgagttgtggtatatctgctcctgggagaaacaggaggataacgaaaagcacttaaattggattaggaatatctacaatttcatgacgccctacgtttccaagaaccccaggttggcctatttgaactacagggatcttgatattggaatcaacgaccccaaaaacccaaacaactacacccaggcaaggatttggggagagaagtacttcgggaagaacttcgacaggctagttaaggtgaaaacgctagttgatccaaataattttttcagaaacgaacagagtatccctcccttaccgcgtcataggcac

SEQ ID NO: 1066 - DNA, 1548 bp, Artificial Sequence
  Synthetic
aatccaagagaaaatttcttgaagtgtttttctcagtatatcccgaataatgcgacgaaccttaagttagtatacactcagaacaaccctctatatatgagcgttctaaattctacaatccacaacctaagatttacgtccgacacgactccgaaacccctagttatagtgacaccgtcacatgttagccatatacaggcaaccatactatgttccaaaaaagttgggttacaaatacgtacccgtagcgggggacacgacgccgaggggatgagttatattagtcaggtgcctttcgtcatagtggatttaagaaatatgaggtcaattaaaatcgacgttcactcacaaactgcctgggttgaggcgggggccacattgggtgaagtatattactgggtcaatgagaagaacgagaatctttcactagcagccggttattgtcccacagtctgcgccggcggtcactttggcggcggcggatacggtcccttaatgagaaattacgggcttgccgcagacaatatcatagatgctcacttagttaatgttaacggaaaagtgttagaccgtaaaagcatgggggaggatctgttttgggcgcttagagggggaggggcagaatcatttggaataatagtggcatggaaaatcaggcttgtggctgttccaaagagtaccatgttctcagtaaagaaaataatggagatccatgagctagttaaacttgtgaataaatggcaaaacatagcctataaatatgataaggacttgctgcttatgactcatttcataaccagaaacattacggataaccaagggaagaacaaaacagccatccatacctactttagctccgttttcttgggtggtgtagacagcttagttgacctgatgaacaagagttttccggaactaggtatcaagaaggaagattgtagagaaatgtcctggattgataccataatcttttacagcggagtcgtcaattatgacactgacaacttcaacaaggaaattttattagataggagtgcgggtcaaaatggggccttcaagatcaaactagactacgttaaaaaacccattcctgaaagtgtttttgttcagattctggagaagctgtatgaagaagatattggagcgggtatgtacgtactttatccgtacggcggcataatggatgagattagtgaaagcgccatccctttcccccacagagctggtatcctgtacgagttgtggtatatctgctcctgggagaaacaggaggataacgaaaagcacttaaattggattaggaatatctacaatttcatgacgccctacgtttccaagaaccccaggttggcctatttgaactacagggatcttgatattggaatcaacgaccccaaaaacccaaacaactacacccaggcaaggatttggggagagaagtacttcgggaagaacttcgacaggctagttaaggtgaaaacgctagttgatccaaataattttttcagaaacgaacagagtatccctcccttaccgcgtcataggcac

SEQ ID NO: 1067 - DNA, 1551 bp, Artificial Sequence
  Synthetic
aatccccaagagaactttcttaagtgtttcagtaaacatatcccaaataacgtggcgaatccgaaattagtatacacgcaaaacgatcagctatatagcagcattctgaatagtaccattcaaaacttgcgctttacttcggacacaactccaaagcctttagtcatagttactccttcaaatgtttcccatattcaggctacaatcctctgctctaaaaaagttgggttgcaaatacgtactagatcaggaggccacgatgccgaaggtatgtcttatatctcccaagtgccattcgttgtcgtcgacttgaggaacatgcattctattaagattgatgtacactcccagaccgcatgggttgaagctggtgccacattaggtgaagtatactattggataaacgagaaaaatgaaaatttatcgtttcctggaggctattgtccaactgttggtgtcggtggtcatttctcaggcgggggctacggagcattgatgcgaaactacggactagcagctgataacattatagacgcccatctcgtgaatgtggatggtaaagttcttgatagaaagagcatgggtgaagatttgttttgggcgatcagaggcggtggaggggaaaactttggtattattgcggcttggaaaataaagctggtcccggttccctcgaaagtaacaatcttttctgtaaagaaaaatatggaaatacatgggttggtcaagttattcaataaatggcaaaacattgcttataagtatgataaagacctcctactgatgactcattttattacgaaaaatattaccgacaatcacggtaagaataaaactacagtgcacggttacttttcttcaattttccatggtggcgttgactctctagtagatttaatgaacaaaagtttccctgagttagggatcaagaaaacggattgtaaagaattgtcttggatcgacacaaccatattctattcgggtgttgttaactttaataccgcaaactttaaaaaggaaattttgttagatcgctctgctggaaagaaaacagcatttagtatcaaacttgactatgtaaagaaaccgatacccgagactgccatggttaagatacttgagaagctatacgaagaggatgtgggagctggcatgtacgttctctacccttacggcggtataatggatgaaatttcagaatccgcaatcccattcccacacagagcaggtattatgtatgaactgtggtatactgcctcatgggagaaacaagaagataacgaaaaacacattaattgggtccgtagcgtctacaatttcactacaccatatgtatccaagaacccgagattggcttacttgaattatagagacttggatctaggaaaaaataatgaagaaagcccgaataattatacacaggcaaggatttggggcgagaagtatttcggcaagaacttcaacagattagtaaaagttaagaccaaagttgaccccaataacttttttagaaatgaacaaagtatccctccactcccaccacatcatcat

SEQ ID NO: 1068 - DNA, 1548 bp, Artificial Sequence
  Synthetic
aatccaagagaaaatttcttgaagtgtttttctcagtatatcccgaataatgcgacgaaccttaagttagtatacactcagaacaaccctctatatatgagcgttctaaattctacaatccacaacctaagatttacgtccgacacgactccgaaacccctagttatagtgacaccgtcacatgttagccatatacagggcaccatactatgttccaaaaaagttgggttacaaatacgtacccgtagcgggggacacgacgcagaggggatgagttatattagtcaggtgcctttcgtcatagtggatttaagaaatatgaggtcaattaaaatcgacgttcactcacaaactgcctgggttgaggcgggggccacattgggtgaagtatattactgggtcaatgagaagaacgagaatctttcactagcagccggttattgtcccacagtctgcgccggcggtcactttggcggcggcggatacggtcccttaatgagaaattacgggcttgccgcagacaatatcatagatgctcacttagttaatgttaacggaaaagtgttagaccgtaaaagcatgggggaggatctgttttgggcgcttagagggggaggggcagaatcatttggaataatagtggcatggaaaatcaggcttgtggctgttccaaagagtaccatgttctcagtaaagaaaataatggagatccatgagctagttaaacttgtgaataaatggcaaaacatagcctataaatatgataaggacttgctgcttatgactcatttcataaccagaaacattacggataaccaagggaagaacaaaacagccatccatacctactttagctccgttttcttgggtggtgtagacagcttagttgacctgatgaacaagagttttccggaactaggtatcaagaaggaagattgtagagaactttcctggattgataccataatcttttacagcggagtcgtcaattatgacactgacaacttcaacaaggaaattttattagataggagtgcgggtcaaaatggggccttcaagatcaaactagactacgttaaaaaacccattcctgaaagtgtttttgttcagattctggagaagctgtatgaagaagatattggtgcgggtatgtacgctctttatccgtacggcggcataatggatgagattagtgaaagcgccatccctttcccccacagagctggtatcctgtacgagttgtggtatatctgctcctgggagaaacaggaggataacgaaaagcacttaaattggattaggaatatctacaatttcatgacgccctacgtttccaagaaccccaggttggcctatttgaactacagggatcttgatattggaatcaacgaccccaaaaacccaaacaactacacccaggcaaggatttggggagagaagtacttcgggaagaacttcgacaggctagttaaggtgaaaacgctagttgatccagataattttttcagaaacgaacagagtatccctcccttaccgcgtcataggcac

SEQ ID NO: 1069 - DNA, 1548 bp, Artificial Sequence
  Synthetic
aatccaagagaaaatttcttgaagtgtttttctcagtatatcccgaataatgcgacgaaccttaagttagtatacactcagaacaaccctctatatatgagcgttctaaattctacaatccacaacctaagatttacgtccgacacgactccgaaacccctagttatagtgacaccgtcacatgttagccatatacaggctaccatactatgttccaaaaaagttgggttacaaatacgtacccgtagcgggggacacgacagtgaggggatgagttatattagtcaggtgcctttcgtcatagtggatttaagaaatatgaggtcaattaaaatcgacgttcactcacaaactgcctgggttgaggcgggggccacattgggtgaagtatattactgggtcaatgagaagaacgagaatctttcactagcagccggttattgtcccacagtctgcgccggcggtcactttggcggcggcggatacggtcccttaatgagaaattacgggcttgccgcagacaatatcatagatgctcacttagttaatgttcatggaaaagtgttagaccgtaaaagcatgggggaggatctgttttgggcgcttagagggggaggggcagaatcatttggaataatagtggcatggaaaatcaggcttgtggctgttccaaagagtaccatgttctcagtaaagaaaataatggagatccatgagctagttaaacttgtgaataaatggcaaaacatagcctataaatatgataaggacttgctgcttatgactcatttcataaccagaaacattacggataaccaagggaagaacaaaacagccatccatacctactttagctccgttttcttgggtggtgtagacagcttagttgacctgatgaacaagagttttccggaactaggtatcaagaaggaagattgtagagaaatgtcctggattgataccataatcttttacagcggagtcgtcaattatgacactgacaacttcaacaaggaaattttattagataggagtgcgggtcaaaatggggccttcaagatcaaactagactacgttaaaaaacccattcctgaaagtgtttttgttcagattctggagaagctgtatgaagaagatattggcgcgggtatgtacgtactttatccgtacggcggcataatggatgagattagtgaaagcgccatccctttcccccacagagctggtatcctgtacgagttgtggtatatctgctcctgggagaaacaggaggataacgaaaagcacttaaattggattaggaatatctacaatttcatgacgccctacgtttccaagaaccccaggttggcctatttgaactacagggatcttgatattggaatcaacgaccccaaaaacccaaacaactacacccaggcaaggatttggggagagaagtacttcgggaagaacttcgacaggctagttaaggtgaaaacgctagttgatccagataattttttcagaaacgaacagagtatccctcccttaccgcgtcataggcac

SEQ ID NO: 1070 - DNA, 1548 bp, Artificial Sequence
  Synthetic
aatccaagagaaaatttcttgaagtgtttttctcagtatatcccgaataatgcgacgaaccttaacttagtatacactcagaacaaccctctatatatgagcgttctaaattctacaatccaaaacctaagatttacgtccgacacgactccgaaacccctagttatagtgacaccgtcacatgttagccatatacaggcaaccatactatgtgccaaaaaagttgggttacaaatacgtacccgtagcgggggacacgacagtgaggggatgagttatattagtcaggtgcctttcgtcatagtggatttaagaaatatgaggtcaattaaaatcgacgttcactcacaaactgcctgggttgaggcgggggccacattgggtgaagtatattactgggtcaatgagaagaacgagaatctttcactagcagccggttattgtcccacagtctgcgccggcggtcactttggcggcggcggatacggtcccttaatgagaaattacgggcttgccgcagacaatatcatagatgctcacttagttaatgttaacggaaaagtgttagaccgtaaaagcatgggggaggatctgttttgggcgcttagagggggaggggcagaatcatttggaataatagtggcatggaaaatcaggcttgtggctgttccaaagagtaccatgttctcagtaaagaaaataatggagatccatgagctagttaaacttgtgaataaatggcaaaacatagcctataaatatgataaggacttgctgcttatgactcatttcataaccagaaacattacggataaccaagggaagaacaaaacagccatccatacctactttagctccgttttcttgggtggtgtagacagcttagttgacctgatgaacaagagttttccggaactaggtatcaagaaggaagattgtagagaaatgtcctggattgataccataatcttttacagcggagtcgtcaattatgacactgacaacttcaacaaggaaattttattagataggagtgcgggtcaaaatggggccttcaagatcaaactagactacgttaaaaaacccattcctgaaagtgtttttgttcagattctggagaagctgtatgaagaagatattggcgcggggatgtacgtactttatccgtacggcggcataatggatgagattagtgaaagcgccatccctttcccccacagagctggtatcctgtacgagttgtggtatatctgctcctgggagaaacaggaggataacgaaaagcacttaaattggattaggaatatctacaatttcatgacgccctacgtttccaagaaccccaggttggcctatttgaactacagggatcttgatattggaatcaacgaccccaaaaacccaaacaactacacccaggcaaggatttggggagagaagtacttcgggaagaacttcgacaggctagttaaggtgaaaacgctagttgatccaaataattttttcagaaacgaacagagtatccctcccttaccgcgtcataggcac

SEQ ID NO: 1071 - DNA, 1548 bp, Artificial Sequence
  Synthetic
aatccaagagaaaatttcttgaagtgtttttctcagtatatcccgaataatgcgacgaaccttaagttagtatacactcagaacaaccctctatatatgagcgttctaaattctacaatccacaacctaagatttacgtccgacacgactccgaaacccctagttatagtgacaccgtcacatgttagccatatacaggctaccatactatgttccaaaaaagttgggttacaaatacgtacccgtagcgggggacacgacagtgaggggatgagttatattagtcaggtgcctttcgtcatagtggatttaagaaatatgaggtcaattaaaatcgacgttcactcacaaactgcctgggttgaggcgggggccacattgggtgaagtatattactgggtcaatgagaagaacgagaatctttcactagcagccggttattgtcccacagtctgcgccggcggtcactttggcggcggcggatacggtcccttaatgagaaattacgggcttgccgcagacaatatcatagatgctcacttagttgatgttcatggaaaagtgttagaccgtaaaagcatgggggaggatctgttttgggcgcttagagggggaggggcagaatcatttggaataatagtggcatggaaaatcaggcttgtggctgttccaaagagtaccatgttctcagtaaagaaaataatggagatccatgagctagttaaacttgtgaataaatggcaaaacatagcctataaatatgataaggacttgctgcttatgactcatttcataaccagaaacattacggataaccaagggaagaacaaaacagccatccatacctactttagctccgttttcttgggtggtgtagacagcttagttgacctgatgaacaagagttttccggaactaggtatcaagaaggaagattgtagagaactttcctggattgataccataatcttttacagcggagtcgtcaattatgacactgacaacttcaacaaggaaattttattagataggagtgcgggtcaaaatggggccttcaagatcaaactagactacgttaaaaaacccattcctgaaagtgtttttgttcagattctggagaagctgtatgaagaagatattggtgcgggaatgtacgtactttatccgtacggcggcataatggatgagattagtgaaagcgccatccctttcccccacagagctggtatcctgtacgagttgtggtatatctgctcctgggagaaacaggaggataacgaaaagcacttaaattggattaggaatatctacaatttcatgacgccctacgtttccaagaaccccaggttggcctatttgaactacagggatcttgatattggaatcaacgaccccaaaaacccaaacaactacacccaggcaaggatttggggagagaagtacttcgggaagaacttcgacaggctagttaaggtgaaaacgctagttgatccaaataattttttcagaaacgaacagagtatccctcccttaccgcgtcataggcac

SEQ ID NO: 1072 - DNA, 1548 bp, Artificial Sequence
  Synthetic
aatccaagagaaaatttcttgaagtgtttttctcagtatatcccgaataatgcgacgaaccttaacttagtatacactcagaacaaccctctatatatgagcgttctaaattctacaatccacaacctaagatttacgtccgacacgactccgaaacccctagttatagtgacaccgtcacatgttagccatatacagggcaccatactatgttccaaaaaagttgggttacaaatacgtacccgtagcgggggacacgacagtgaggggatgagttatattagtcaggtgcctttcgtcatagtggatttaagaaatatgaggtcaattaaaatcgacgttcactcacaaactgcctgggttcaagcgggggccacattgggtgaagtatattactggattaatgagaagaacgagaatctttcactagcagccggttattgtcccacagtcggagccggcggtcactttggcggcggcggatacggtcccttaatgagaaagtacgggcttgccgcagacaatatcatagatgctcacttagttgatgttaacggaaaagtgttagaccgtaaaagcatgggggaggatctgttttgggcgcttagagggggaggggcagaatcatttggaataatagtggcatggaaaatcaggcttgtggctgttccaaagagtaccatgttctcagtaaagaaaataatggagatccatgagctagttaaacttgtgaataaatggcaaaacatagcctataaatatgataaggacttgctgcttatgactcatttcataaccagaaacattacggataaccaagggaagaacaaaacagccatccatacctactttagctccgttttcttgggtggtgtagacagcttagttgacctgatgaacaagagttttccggaactaggtatcaagaaggaagattgtagagaaatgtcctggattgataccataatcttttacagcggagtcgtcaattatgacactgacaacttcaacaaggaaattttattagataggagtgcgggtcaaaatggggccttcaagatcaaactagactacgttaaaaaacccattcctgaaagtgtttttgttcagattctggagaagctgtatgaagaagatattggcgcggggatgtacgctctttatccgtacggcggcataatggatgagattagtgaaagcgccatccctttcccccacagagctggtatcctgtacgagttgtggtatatctgctcctgggagaaacaggaggataacgaaaagcacttaaattggattaggaatatctacaatttcatgacgccctacgtttccaagaaccccaggttggcctatttgaactacagggatcttgatattggaatcaacgaccccaaaaacccaaacaactacacccaggcaaggatttggggagagaagtacttcgggaagaacttcgacaggctagttaaggtgaaaacgctagttgatccaaataattttttcagaaacgaacagagtatccctcccttaccgcgtcataggcac

SEQ ID NO: 1073 - DNA, 1548 bp, Artificial Sequence
  Synthetic
aatccaagagaaaatttcttgaagtgtttttctcagtatatcccgaataatgcgacgaaccttaagttagtatacactcagaacaaccctctatatatgagcgttctaaattctacaatccacaacctaagatttacgtccgacacgactccgaaacccctagttatagtgacaccgtcacatgttagccatatacagggcaccatactatgttccaaaaaagttgggttacaaatacgtacccgtagcgggggacacgacgccgaggggatgagttatattagtcaggtgcctttcgtcatagtggatttaagaaatatgaggtcaattaaaatcgacgttcactcacaaactgcctgggttgaggcgggggccacattgggtgaagtatattactgggtcaatgagaagaacgagaatctttcactagcagccggttattgtcccacagtctgcgccggcggtcactttggcggcggcggatacggtcccttaatgagaaattacgggcttgccgcagacaatatcatagatgctcacttagttaatgttcatggaaaagtgttagaccgtaaaagcatgggggaggatctgttttgggcgcttagagggggaggggcagaatcatttggaataatagtggcatggaaaatcaggcttgtggctgttccaaagagtaccatgttctcagtaaagaaaataatggagatccatgagctagttaaacttgtgaataaatggcaaaacatagcctataaatatgataaggacttgctgcttatgactcatttcataaccagaaacattacggataaccaagggaagaacaaaacagccatccatacctactttagctccgttttcttgggtggtgtagacagcttagttgacctgatgaacaagagttttccggaactaggtatcaagaaggaagattgtagagaactttcctggattgataccataatcttttacagcggagtcgtcaattatgacactgacaacttcaacaaggaaattttattagataggagtgcgggtcaaaatggggccttcaagatcaaactagactacgttaaaaaacccattcctgaaagtgtttttgttcagattctggagaagctgtatgaagaagatattggtgcgggtatgtacgctctttatccgtacggcggcataatggatgagattagtgaaagcgccatccctttcccccacagagctggtatcctgtacgagttgtggtatatctgctcctgggagaaacaggaggataacgaaaagcacttaaattggattaggaatatctacaatttcatgacgccctacgtttccaagaaccccaggttggcctatttgaactacagggatcttgatattggaatcaacgaccccaaaaacccaaacaactacacccaggcaaggatttggggagagaagtacttcgggaagaacttcgacaggctagttaaggtgaaaacgctagttgatccagataattttttcagaaacgaacagagtatccctcccttaccgcgtcataggcac

SEQ ID NO: 1074 - DNA, 1548 bp, Artificial Sequence
  Synthetic
aatccaagagaaaatttcttgaagtgtttttctcagtatatcccgaataatgcgacgaaccttaagttagtatacactcagaacaaccctctatatatgagcgttctaaattctacaatccacaacctaagatttacgtccgacacgactccgaaacccctagttatagtgacaccgtcacatgttagccatatacagggcaccatactatgttccaaaaaagttgggttacaaatacgtacccgtagcgggggacacgacgcagaggggatgagttatattagtcaggtgcctttcgtcatagtggatttaagaaatatgaggtcaattaaaatcgacgttcactcacaaactgcctgggttgaggcgggggccacattgggtgaagtatattactgggtcaatgagaagaacgagaatctttcactagcagccggttattgtcccacagtctgcgccggcggtcactttggcggcggcggatacggtcccttaatgagaaattacgggcttgccgcagacaatatcatagatgctcacttagttaatgttcatggaaaagtgttagaccgtaaaagcatgggggaggatctgttttgggcgcttagagggggaggggcagaatcatttggaataatagtggcatggaaaatcaggcttgtggctgttccaaagagtaccatgttctcagtaaagaaaataatggagatccatgagctagttaaacttgtgaataaatggcaaaacatagcctataaatatgataaggacttgctgcttatgactcatttcataaccagaaacattacggataaccaagggaagaacaaaacagccatccatacctactttagctccgttttcttgggtggtgtagacagcttagttgacctgatgaacaagagttttccggaactaggtatcaagaaggaagattgtagagaaatgtcctggattgataccataatcttttacagcggagtcgtcaattatgacactgacaacttcaacaaggaaattttattagataggagtgcgggtcaaaatggggccttcaagatcaaactagactacgttaaaaaacccattcctgaaagtgtttttgttcagattctggagaagctgtatgaagaagatattggagcgggtatgtacgctctttatccgtacggcggcataatggatgagattagtgaaagcgccatccctttcccccacagagctggtatcctgtacgagttgtggtatatctgctcctgggagaaacaggaggataacgaaaagcacttaaattggattaggaatatctacaatttcatgacgccctacgtttccaagaaccccaggttggcctatttgaactacagggatcttgatattggaatcaacgaccccaaaaacccaaacaactacacccaggcaaggatttggggagagaagtacttcgggaagaacttcgacaggctagttaaggtgaaaacgctagttgatccagataattttttcagaaacgaacagagtatccctcccttaccgcgtcataggcac

SEQ ID NO: 1075 - DNA, 1548 bp, Artificial Sequence
  Synthetic
aatccaagagaaaatttcttgaagtgtttttctcagtatatcccgaataatgcgacgaaccttaacttagtatacactcagaacaaccctctatatatgagcgttctaaattctacaatccacaacctaagatttacgtccgacacgactccgaaacccctagttatagtgacaccgtcacatgttagccatatacaggcaaccatactatgttccaaaaaagttgggttacaaatacgtacccgtagcgggggacacgacagtgaggggatgagttatattagtcaggtgcctttcgtcatagtggatttaagaaatatgaggtcaattaaaatcgacgttcactcacaaactgcctgggttgaggcgggggccacattgggtgaagtatattactggattaatgagaagaacgagaatctttcactagcagccggttattgtcccacagtcggtgccggcggtcactttggcggcggcggatacggtcccttaatgagaaagtacgggcttgccgcagacaatatcatagatgctcacttagttgatgttaatggaaaagtgttagaccgtaaaagcatgggggaggatctgttttgggcgcttagagggggaggggcagaatcatttggaataatagtggcatggaaaatcaggcttgtggctgttccaaagagtaccatgttctcagtaaagaaaataatggagatccatgagctagttaaacttgtgaataaatggcaaaacatagcctataaatatgataaggacttgctgcttatgactcatttcataaccagaaacattacggataaccaagggaagaacaaaacagccatccatacctactttagctccgttttcttgggtggtgtagacagcttagttgacctgatgaacaagagttttccggaactaggtatcaagaaggaagattgtagagaaatgtcctggattgataccataatcttttacagcggagtcgtcaattatgacactgacaacttcaacaaggaaattttattagataggagtgcgggtcaaaatggggccttcaagatcaaactagactacgttaaaaaacccattcctgaaagtgtttttgttcagattctggagaagctgtatgaagaagatattggcgcggggatgtacgtcctttatccgtacggcggcataatggatgagattagtgaaagcgccatccctttcccccacagagctggtatcctgtacgagttgtggtatatctgctcctgggagaaacaggaggataacgaaaagcacttaaattggattaggaatatctacaatttcatgacgccctacgtttccaagaaccccaggttggcctatttgaactacagggatcttgatattggaatcaacgaccccaaaaacccaaacaactacacccaggcaaggatttggggagagaagtacttcgggaagaacttcgacaggctagttaaggtgaaaacgctagttgatccaaataattttttcagaaacgaacagagtatccctcccttaccgcgtcataggcac

SEQ ID NO: 1076 - DNA, 1548 bp, Artificial Sequence
  Synthetic
aatccaagagaaaatttcttgaagtgtttttctcagtatatcccgaataatgcgacgaaccttaacttagtatacactcagaacaaccctctatatatgagcgttctaaattctacaatccacaacctaagatttacgtccgacacgactccgaaacccctagttatagtgacaccgtcacatgttagccatatacaggcaaccatactatgtgccaaaaaagttgggttacaaatacgtacccgtagcgggggacacgacagtgaggggatgagttatattagtcaggtgcctttcgtcatagtggatttaagaaatatgaggtcaattaaaatcgacgttcactcacaaactgcctgggttgaggcgggggccacattgggtgaagtatattactgggtcaatgagaagaacgagaatctttcactagcagccggttattgtcccacagtctgcgccggcggtcactttggcggcggcggatacggtcccttaatgagaaattacgggcttgccgcagacaatatcatagatgctcacttagttaatgttaacggaaaagtgttagaccgtaaaagcatgggggaggatctgttttgggcgcttagagggggaggggcagaatcatttggaataatagtggcatggaaaatcaggcttgtggctgttccaaagagtaccatgttctcagtaaagaaaataatggagatccatgagctagttaaacttgtgaataaatggcaaaacatagcctataaatatgataaggacttgctgcttatgactcatttcataaccagaaacattacggataaccaagggaagaacaaaacagccatccatacctactttagctccgttttcttgggtggtgtagacagcttagttgacctgatgaacaagagttttccggaactaggtatcaagaaggaagattgtagagaaatgtcctggattgataccataatcttttacagcggagtcgtcaattatgacactgacaacttcaacaaggaaattttattagataggagtgcgggtcaaaatggggccttcaagatcaaactagactacgttaaaaaacccattcctgaaagtgtttttgttcagattctggagaagctgtatgaagaagatattggcgcggggatgtacgtactttatccgtacggcggcataatggatgagattagtgaaagcgccatccctttcccccacagagctggtatcctgtacgagttgtggtatatctgctcctgggagaaacaggaggataacgaaaagcacttaaattggattaggaatatctacaatttcatgacgccctacgtttccaagaaccccaggttggcctatttgaactacagggatcttgatattggaatcaacgaccccaaaaacccaaacaactacacccaggcaaggatttggggagagaagtacttcgggaagaacttcgacaggctagttaaggtgaaaacgctagttgatccagataattttttcagaaacgaacagagtatccctcccttaccgcgtcataggcac

SEQ ID NO: 1077 - DNA, 1548 bp, Artificial Sequence
  Synthetic
aatccaagagaaaatttcttgaagtgtttttctcagtatatcccgaataatgcgacgaaccttaacttagtatacactcagaacaaccctctatatatgagcgttctaaattctacaatccaaaacctaagatttacgtccgacacgactccgaaacccctagttatagtgacaccgtcacatgttagccatatacaggctaccatactatgtgccaaaaaagttgggttacaaatacgtacccgtagcgggggacacgacagtgaggggatgagttatattagtcaggtgcctttcgtcatagtggatttaagaaatatgaggtcaattaaaatcgacgttcactcacaaactgcctgggttgaggcgggggccacattgggtgaagtatattactgggtcaatgagaagaacgagaatctttcactagcagccggttattgtcccacagtctgcgccggcggtcactttggcggcggcggatacggtcccttaatgagaaattacgggcttgccgcagacaatatcatagatgctcacttagttaatgttaacggaaaagtgttagaccgtaaaagcatgggggaggatctgttttgggcgcttagagggggaggggcagaatcatttggaataatagtggcatggaaaatcaggcttgtggctgttccaaagagtaccatgttctcagtaaagaaaataatggagatccatgagctagttaaacttgtgaataaatggcaaaacatagcctataaatatgataaggacttgctgcttatgactcatttcataaccagaaacattacggataaccaagggaagaacaaaacagccatccatacctactttagctccgttttcttgggtggtgtagacagcttagttgacctgatgaacaagagttttccggaactaggtatcaagaaggaagattgtagagaaatgtcctggattgataccataatcttttacagcggagtcgtcaattatgacactgacaacttcaacaaggaaattttattagataggagtgcgggtcaaaatggggccttcaagatcaaactagactacgttaaaaaacccattcctgaaagtgtttttgttcagattctggagaagctgtatgaagaagatattggcgcggggatgtacgtactttatccgtacggcggcataatggatgagattagtgaaagcgccatccctttcccccacagagctggtatcctgtacgagttgtggtatatctgctcctgggagaaacaggaggataacgaaaagcacttaaattggattaggaatatctacaatttcatgacgccctacgtttccaagaaccccaggttggcctatttgaactacagggatcttgatattggaatcaacgaccccaaaaacccaaacaactacacccaggcaaggatttggggagagaagtacttcgggaagaacttcgacaggctagttaaggtgaaaacgctagttgatccagataattttttcagaaacgaacagagtatccctcccttaccgcgtcataggcac

SEQ ID NO: 1078 - DNA, 1551 bp, Artificial Sequence
  Synthetic
aatccccaagagaactttcttcagtgtttcagtaaacatatcccaaataacgtggcgaatccgaaattagtatacacgcaaaacgatcagctatatatgagcattctgaatagtaccattcaaaacttgcgctttacatcggacacaactccaaagcctttagtcatagttactccttcaaatgtctcccatattcaggctacaatcctctgctctaaaaaagttgggttgcaaatacgtactagatcaggaggccacgatgccgaaggtatgtcttatatctcccaagtgccattcgttgtcgtcgacttgaggaacatgcattctattaagattgatgtacactcccagaccgcatgggttgaagctggtgccacattaggtgaagtatactattggataaacgagaaaaatgaaaatttatcgtttcctggaggctattgtccaactgttggtgtcggtggtcatttctcaggcgggggctacggagcattgatgcgaaactacggactagcagctgataacattatagacgcccatctcgtgaatgtggatggtaaagttcttgatagaaagagcatgggtgaagatttgttttgggcgatcagaggcggtggaggggaaaactttggtattattgcggcttggaaaataaagctggtcccggttccctcgaaagttacaatcttttctgtaaagaaaaatatggaaatacatgggttggtcaagttattcaataaatggcaaaacattgcttataagtatgataaagacctcgttctgatgactcattttattacgaaaaatattaccgacaatcacggtaagaataaaactacagtgcacggttacttttcttcaattttccatggtggcgttgactctctagtagatttaatgaacaaaagtttccctgagttagggatcaagaaaacggattgtaaagaattttcttggatcgacacaaccatattctattcgggtgttgttaactttaataccgcaaactttaaaaaggaaattttgttagatcgctctgctggaaagaaaacagcatttagtatcaaacttgactatgtaaagaaaccgatacccgagactgccatggttaagatacttgagaagctatacgaagaggatgtgggagctggcatgtacgttctctacccttacggcggtataatggaagaaatttcagaatccgcaatcccattcccacacagagcaggtattatgtatgaactgtggtatactgcctcatgggagaaacaagaagataacgaaaaacacattaattgggtccgtagcgtctacaatttcactacaccatatgtatccaaaaacccgagattggcttacttgaattatagagacttggatctaggaaaaaataatgaggaaagcccgaataattatacacaggcaaggatttggggcgagaagtatttcggcaagaacttcaacagattagtaaaagttaagaccaaagttgaccccaataacttttttagaaatgaacaaagtatccctccactcccaccacatcatcat

SEQ ID NO: 1079 - DNA, 1548 bp, Artificial Sequence
  Synthetic
aatccaagagaaaatttcttgaagtgtttttctcagtatatcccgaataatgcgacgaaccttaacttagtatacactcagaacaaccctctatatatgagcgttctaaattctacaatccacaacctaagatttacgtccgacacgactccgaaacccctagttatagtgacaccgtcacatgttagccatatacagggcaccatactatgttccaaaaaagttgggttacaaatacgtacccgtagcgggggacacgacagtgaggggatgagttatattagtcaggtgcctttcgtcatagtggatttaagaaatatgaggtcaattaaaatcgacgttcactcacaaactgcctgggttgaggcgggggccacattgggtgaagtatattactggattaatgagaagaacgagaatctttcactagcagccggttattgtcccacagtcggtgccggcggtcactttggcggcggcggatacggtcccttaatgagaaagtacgggcttgccgcagacaatatcatagatgctcacttagttgatgttaacggaaaagtgttagaccgtaaaagcatgggggaggatctgttttgggcgcttagagggggaggggcagaatcatttggaataatagtggcatggaaaatcaggcttgtggctgttccaaagagtaccatgttctcagtaaagaaaataatggagatccatgagctagttaaacttgtgaataaatggcaaaacatagcctataaatatgataaggacttgctgcttatgactcatttcataaccagaaacattacggataaccaagggaagaacaaaacagccatccatacctactttagctccgttttcttgggtggtgtagacagcttagttgacctgatgaacaagagttttccggaactaggtatcaagaaggaagattgtagagaaatgtcctggattgataccataatcttttacagcggagtcgtcaattatgacactgacaacttcaacaaggaaattttattagataggagtgcgggtcaaaatggggccttcaagatcaaactagactacgttaaaaaacccattcctgaaagtgtttttgttcagattctggagaagctgtatgaagaagatattggcgcggggatgtacgctctttatccgtacggcggcataatggatgagattagtgaaagcgccatccctttcccccacagagctggtatcctgtacgagttgtggtatatctgctcctgggagaaacaggaggataacgaaaagcacttaaattggattaggaatatctacaatttcatgacgccctacgtttccaagaaccccaggttggcctatttgaactacagggatcttgatattggaatcaacgaccccaaaaacccaaacaactacacccaggcaaggatttggggagagaagtacttcgggaagaacttcgacaggctagttaaggtgaaaacgctagttgatccaaataattttttcagaaacgaacagagtatccctcccttaccgcgtcataggcac

SEQ ID NO: 1080 - DNA, 1551 bp, Artificial Sequence
  Synthetic
aatccccaagagaactttcttaagtgtttcagtaaacatatcccaaataacgtggcgaatccgaaattagtatacacgcaaaatgatcagttttatatgagcattctgaatagtaccattcaaaacttgcgctttacatcggacacaactccaaagcctttagtcatagttactccttcaaatgtttcccatattcaggctacaatcctctgctctaaaaaagttgggttgcaaatacgtactagatcaggaggccacgatgccgaaggtatgtcttatatctcccaagtgccattcgttgtcgtcgacttgaggaacatgcattctattaagattgatgtacactcccagaccgcatgggttgaagctggtgccacattaggtgaagtatactattggataaacgagaaaaatgaaaatttatcgtttcctggaggctattgtccaactgttggtgtcggtggtcatttctcaggcgggggctacggagcattgatgcgaaactacggactagcagctgataacattatagacgcccatctcgtgaatgtggatggtaaagttcttgatagaaagagcatgggtgaagatttgttttgggcgatcagaggcggtggaggggaaaactttggtattattgcggcttggaaaataaagctggtcccggttccctcgaaagtaacaatcttttctgtaaagaaaaatatggaaatacatgggttggtcaagttattcaataaatggcaaaacattgcttataagtatgataaagacctcgttctgatgactcattttattacgaaaaatattaccgacaatcacggtaagaataaaactacagtgcacggttacttttcttcaattttccatggtggcgttgactctctagtagatttaatgaacaaaagtttccctgagttagggatcaagaaaacggattgtaaagaattttcttggatcgacacaaccatattctattcgggtgttgttaactttaataccgcaaactttaaaaaggaaattttgttagatcgctctgctggaaagaaaacagcatttagtatcaaacttgactatgtaaagaaaccgatacccgagactgccatggttaagatacttgagaagctatacgaagaggatgtgggagctggcatgtacgttctctacccttacggcggtataatggaagaaatttcagaatccgcaatcccattcccacacagagcaggtattatgtatgaactgtggtatactgcctcatgggagaaacaagaagataacgaaaaacacattaattgggtccgtagcgtctacaatttcactacaccatatgtatccaagaacccgagattggcttacttgaattatagagacttggatctaggaaaaaataatgaagagagcccgaataattatacacaggcaaggatttggggcgagaagtatttcggcaagaacttcaacagattagtaaaagttaagaccaaagttgaccccaataacttttttagaaatgaacaaagtatccctccactcccaccacatcatcat

SEQ ID NO: 1081 - DNA, 1548 bp, Artificial Sequence
  Synthetic
aatccaagagaaaatttcttgaagtgtttttctcagtatatcccgaataatgcgacgaaccttaacttagtatacactcagaacaaccctctatatatgagcgttctaaattctacaatccacaacctaagatttacgtccgacacgactccgaaacccctagttatagtgacaccgtcacatgttagccatatacagggcaccatactatgttccaaaaaagttgggttacaaatacgtacccgtagcgggggacacgacagtgaggggatgagttatattagtcaggtgcctttcgtcatagtggatttaagaaatatgaggtcaattaaaatcgacgttcactcacaaactgcctgggttcaagcgggggccacattgggtgaagtatattactggatcaatgagaagaacgagaatctttcactaccagccggttattgtcccacagtcggcgccggcggtcactttggcggcggcggatacggtcccttaatgagaaagtacgggcttgccgcagacaatatcatagatgctcacttagttgatgttaatggaaaagtgttagaccgtaaaagcatgggggaggatctgttttgggcgcttagagggggaggggcagaatcatttggaataatagtggcatggaaaatcaggcttgtggctgttccaaagagtaccatgttctcagtaaagaaaataatggagatccatgagctagttaaacttgtgaataaatggcaaaacatagcctataaatatgataaggacttgctgcttatgactcatttcataaccagaaacattacggataaccaagggaagaacaaaacagccatccatacctactttagctccgttttcttgggtggtgtagacagcttagttgacctgatgaacaagagttttccggaactaggtatcaagaaggaagattgtagagaaatgtcctggattgataccataatcttttacagcggagtcgtcaattatgacactgacaacttcaacaaggaaattttattagataggagtgcgggtcaaaatggggccttcaagatcaaactagactacgttaaaaaacccattcctgaaagtgtttttgttcagattctggagaagctgtatgaagaagatattggcgcggggatgtacgctctttatccgtacggcggcataatggatgagattagtgaaagcgccatccctttcccccacagagctggtatcctgtacgagttgtggtatatctgctcctgggagaaacaggaggataacgaaaagcacttaaattggattaggaatatctacaatttcatgacgccctacgtttccaagaaccccaggttggcctatttgaactacagggatcttgatattggaatcaacgaccccaaaaacccaaacaactacacccaggcaaggatttggggagagaagtacttcgggaagaacttcgacaggctagttaaggtgaaaacgctagttgatccaaataattttttcagaaacgaacagagtatccctcccttaccgcgtcataggcac

SEQ ID NO: 1082 - DNA, 1551 bp, Artificial Sequence
  Synthetic
aatccccaagagaactttcttaagtgtttcagtaaacatatcccaaataacgtggcgaatccgaaattagtatacacgcaaaatgatcagctatatatgagcattctgaatagtaccattcaaaacttgcgctttacatcggacacaactccaaagcctttagtcatagttactccttcaaatgtttcccatattcaggctacaatcctctgctctaaaaaagttgggttgcaaatacgtactagatcaggaggccacgatgccgaaggtatgtcttatatctcccaagtgccattcgttgtcgtcgacttgaggaacatgcattctattaagattgatgtacactcccagaccgcatgggttgaagctggtgccacattaggtgaagtatactattggataaacgagaaaaatgaaaatttatcgtttcctggaggctattgtccaactgttggtgtcggtggtcatttctcaggcgggggctacggagcattgatgcgaaactacggactagcagctgataacattatagacgcccatctcgtgaatgtggatggtaaagttcttgatagaaagagcatgggtgaagatttgttttgggcgatcagaggcggtggaggggaaaactttggtattattgcggcttggaaaataaagctggtccctgttccctcgaaagtaacaatcttttctgtaaagaaaaatatggaaatacatgggttggtcaagttattcaataaatggcaaaacattgcttataagtatgataaagacctcttactgatgactcattttattacgaaaaatattaccgacaatcacggtaagaataaaactacagtgcacggttacttttcttcaattttccatggtggcgttgactctctagtagatttaatgaacaaaagtttccctgagttagggatcaagaaaacggattgtaaagaactttcttggatcgacacaaccatattctattcgggtgttgttaactttaataccgcaaactttaaaaaggaaattttgttagatcgctctgctggaaagaaaacagcatttagtatcaaacttgactatgtaaagaaaccgatacccgagactgccatggttaagatacttgagaagctatacgaagaggatgtgggagctggcatgtacgttctctacccttacggcggtataatggaagaaatttcagaatccgcaatcccattcccacacagagcaggtattatgtatgaactgtggtatactgcctcatgggagaaacaagaagataacgaaaaacacattaattgggtccgtagcgtctacaatttcactacaccatatgtatccaaaaacccgagattggcttacttgaattatagagacttggatctaggaaaaaacaatgaggagagcccgaataattatacacaggcaaggatttggggcgagaagtatttcggcaagaacttcaacagattagtaaaagttaagaccaaagttgaccccaataacttttttagaaatgaacaaagtatccctccactcccaccacatcatcat

SEQ ID NO: 1083 - DNA, 1548 bp, Artificial Sequence
  Synthetic
aatccaagagaaaatttcttgaagtgtttttctcagtatatcccgaataatgcgacgaaccttaacttagtatacactcagaacaaccctctatatatgagcgttctaaattctacaatccacaacctaagatttacgtccgacacgactccgaaacccctagttatagtgacaccgtcacatgttagccatatacagggcaccatactatgtgctaaaaaagttgggttacaaatacgtacccgtagcgggggacacgacgccgaggggatgagttatattagtcaggtgcctttcgtcatagtggatttaagaaatatgaggtcaattaaaatcgacgttcactcacaaactgcctgggttgaggcgggggccacattgggtgaagtatattactgggtcaatgagaagaacgagaatctttcactagcagccggttattgtcccacagtctgcgccggcggtcactttggcggcggcggatacggtcccttaatgagaaattacgggcttgccgcagacaatatcatagatgctcacttagttaatgttaatggaaaagtgttagaccgtaaaagcatgggggaggatctgttttgggcgcttagagggggaggggcagaatcatttggaataatagtggcatggaaaatcaggcttgtggctgttccaaagagtaccatgttctcagtaaagaaaataatggagatccatgagctagttaaacttgtgaataaatggcaaaacatagcctataaatatgataaggacttgctgcttatgactcatttcataaccagaaacattacggataaccaagggaagaacaaaacagccatccatacctactttagctccgttttcttgggtggtgtagacagcttagttgacctgatgaacaagagttttccggaactaggtatcaagaaggaagattgtagagaaatgtcctggattgataccataatcttttacagcggagtcgtcaattatgacactgacaacttcaacaaggaaattttattagataggagtgcgggtcaaaatggggccttcaagatcaaactagactacgttaaaaaacccattcctgaaagtgtttttgttcagattctggagaagctgtatgaagaagatattggcgcggggatgtacgctctttatccgtacggcggcataatggatgagattagtgaaagcgccatccctttcccccacagagctggtatcctgtacgagttgtggtatatctgctcctgggagaaacaggaggataacgaaaagcacttaaattggattaggaatatctacaatttcatgacgccctacgtttccaagaaccccaggttggcctatttgaactacagggatcttgatattggaatcaacgaccccaaaaacccaaacaactacacccaggcaaggatttggggagagaagtacttcgggaagaacttcgacaggctagttaaggtgaaaacgctagttgatccagataattttttcagaaacgaacagagtatccctcccttaccgcgtcataggcac

SEQ ID NO: 1084 - DNA, 1548 bp, Artificial Sequence
  Synthetic
aatccaagagaaaatttcttgaagtgtttttctcagtatatcccgaataatgcgacgaaccttaagttagtatacactcagaacaaccctctatatatgagcgttctaaattctacaatccacaacctaagatttacgtccgacacgactccgaaacccctagttatagtgacaccgtcacatgttagccatatacaggctaccatactatgttccaaaaaagttgggttacaaatacgtacccgtagcgggggacacgacagtgaggggatgagttatattagtcaggtgcctttcgtcatagtggatttaagaaatatgaggtcaattaaaatcgacgttcactcacaaactgcctgggttgaggcgggggccacattgggtgaagtatattactgggtcaatgagaagaacgagaatctttcactagcagccggttattgtcccacagtctgcgccggcggtcactttggcggcggcggatacggtcccttaatgagaaattacgggcttgccgcagacaatatcatagatgctcacttagttaatgttaacggaaaagtgttagaccgtaaaagcatgggggaggatctgttttgggcgcttagagggggaggggcagaatcatttggaataatagtggcatggaaaatcaggcttgtggctgttccaaagagtaccatgttctcagtaaagaaaataatggagatccatgagctagttaaacttgtgaataaatggcaaaacatagcctataaatatgataaggacttgctgcttatgactcatttcataaccagaaacattacggataaccaagggaagaacaaaacagccatccatacctactttagctccgttttcttgggtggtgtagacagcttagttgacctgatgaacaagagttttccggaactaggtatcaagaaggaagattgtagagaactttcctggattgataccataatcttttacagcggagtcgtcaattatgacactgacaacttcaacaaggaaattttattagataggagtgcgggtcaaaatggggccttcaagatcaaactagactacgttaaaaaacccattcctgaaagtgtttttgttcagattctggagaagctgtatgaagaagatattggcgcgggtatgtacgtactttatccgtacggcggcataatggatgagattagtgaaagcgccatccctttcccccacagagctggtatcctgtacgagttgtggtatatctgctcctgggagaaacaggaggataacgaaaagcacttaaattggattaggaatatctacaatttcatgacgccctacgtttccaagaaccccaggttggcctatttgaactacagggatcttgatattggaatcaacgaccccaaaaacccaaacaactacacccaggcaaggatttggggagagaagtacttcgggaagaacttcgacaggctagttaaggtgaaaacgctagttgatccagataattttttcagaaacgaacagagtatccctcccttaccgcgtcataggcac

SEQ ID NO: 1085 - DNA, 1548 bp, Artificial Sequence
  Synthetic
aatccaagagaaaatttcttgaagtgtttttctcagtatatcccgaataatgcgacgaaccttaacttagtatacactcagaacaaccctctatatatgagcgttctaaattctacaatccacaacctaagatttacgtccgacacgactccgaaacccctagttatagtgacaccgtcacatgttagccatatacaggctaccatactatgtgcaaaaaaagttgggttacaaatacgtacccgtagcgggggacacgacagtgaggggatgagttatattagtcaggtgcctttcgtcatagtggatttaagaaatatgaggtcaattaaaatcgacgttcactcacaaactgcctgggttcaagcgggggccacattgggtgaagtatattactggattaatgagaagaacgagaatctttcactagcagccggttattgtcccacagtcggtgccggcggtcactttggcggcggcggatacggtcccttaatgagaaagtacgggcttgccgcagacaatatcatagatgctcacttagttgatgttaatggaaaagtgttagaccgtaaaagcatgggggaggatctgttttgggcgcttagagggggaggggcagaatcatttggaataatagtggcatggaaaatcaggcttgtggctgttccaaagagtaccatgttctcagtaaagaaaataatggagatccatgagctagttaaacttgtgaataaatggcaaaacatagcctataaatatgataaggacttgctgcttatgactcatttcataaccagaaacattacggataaccaagggaagaacaaaacagccatccatacctactttagctccgttttcttgggtggtgtagacgaattagttgacctgatgaacaagagttttccggaactaggtatcaagaaggaagattgtagagaaatgtcctggattgataccataatcttttacagcggagtcgtcaattatgacactgacaacttcaacaaggaaattttattagataggagtgcgggtcaaaatggggccttcaagatcaaactagactacgttaaaaaacccattcctgaaagtgtttttgttcagattctggagaagctgtatgaagaagatattggcgcggggatgtacgtactttatccgtacggcggcataatggatgagattagtgaaagcgccatccctttcccccacagagctggtatcctgtacgagttgtggtatatctgctcctgggagaaacagacagataacgaaaagcacttaaattggattaggaatatctacaatttcatgacgccctacgtttccaagaaccccaggttggcctatttgaactacagggatcttgatattggaatcaacgaccccaaaaacccaaacaactacacccaggcaaggcaatggggagagaagtacttcgggaagaacttcgacaggctagttaaggtgaaaacgctagttgatccaaataattttttcagaaacgaacagagtatccctcccttaccgcgtcataggcac

SEQ ID NO: 1086 - DNA, 1548 bp, Artificial Sequence
  Synthetic
aatccaagagaaaatttcttgaagtgtttttctcagtatatcccgaataatgcgacgaaccttaacttagtatacactcagaacaaccctctatatatgagcgttctaaattctacaatccacaacctaagatttacgtccgacacgactccgaaacccctagttatagtgacaccgtcacatgttagccatatacaggcaaccatactatgttccaaaaaagttgggttacaaatacgtacccgtagcgggggacacgacagtgaggggatgagttatattagtcaggtgcctttcgtcatagtggatttaagaaatatgaggtcaattaaaatcgacgttcactcacaaactgcctgggttcaagcgggggccacattgggtgaagtatattactgggtcaatgagaagaacgagaatctttcactagcagccggttattgtcccacagtctgcgccggcggtcactttggcggcggcggatacggtcccttaatgagaaattacgggcttgccgcagacaatatcatagatgctcacttagttaatgttaacggaaaagtgttagaccgtaaaagcatgggggaggatctgttttgggcgcttagagggggaggggcagaatcatttggaataatagtggcatggaaaatcaggcttgtggctgttccaaagagtaccatgttctcagtaaagaaaataatggagatccatgagctagttaaacttgtgaataaatggcaaaacatagcctataaatatgataaggacttgctgcttatgactcatttcataaccagaaacattacggataaccaagggaagaacaaaacagccatccatacctactttagctccgttttcttgggtggtgtagacagcttagttgacctgatgaacaagagttttccggaactaggtatcaagaaggaagattgtagagaaatgtcctggattgataccataatcttttacagcggagtcgtcaattatgacactgacaacttcaacaaggaaattttattagataggagtgcgggtcaaaatggggccttcaagatcaaactagactacgttaaaaaacccattcctgaaagtgtttttgttcagattctggagaagctgtatgaagaagatattggcgcggggatgtacgtcctttatccgtacggcggcataatggatgagattagtgaaagcgccatccctttcccccacagagctggtatcctgtacgagttgtggtatatctgctcctgggagaaacaggaggataacgaaaagcacttaaattggattaggaatatctacaatttcatgacgccctacgtttccaagaaccccaggttggcctatttgaactacagggatcttgatattggaatcaacgaccccaaaaacccaaacaactacacccaggcaaggatttggggagagaagtacttcgggaagaacttcgacaggctagttaaggtgaaaacgctagttgatccaaataattttttcagaaacgaacagagtatccctcccttaccgcgtcataggcac

SEQ ID NO: 1087 - DNA, 1548 bp, Artificial Sequence
  Synthetic
aatccaagagaaaatttcttgaagtgtttttctcagtatatcccgaataatgcgacgaaccttaagttagtatacactcagaacaaccctctatatatgagcgttctaaattctacaatccacaacctaagatttacgtccgacacgactccgaaacccctagttatagtgacaccgtcacatgttagccatatacaggctaccatactatgttccaaaaaagttgggttacaaatacgtacccgtagcgggggacacgacagtgaggggatgagttatattagtcaggtgcctttcgtcatagtggatttaagaaatatgaggtcaattaaaatcgacgttcactcacaaactgcctgggttgaggcgggggccacattgggtgaagtatattactgggtcaatgagaagaacgagaatctttcactagcagccggttattgtcccacagtctgcgccggcggtcactttggcggcggcggatacggtcccttaatgagaaattacgggcttgccgcagacaatatcatagatgctcacttagttaatgttcatggaaaagtgttagaccgtaaaagcatgggggaggatctgttttgggcgcttagagggggaggggcagaatcatttggaataatagtggcatggaaaatcaggcttgtggctgttccaaagagtaccatgttctcagtaaagaaaataatggagatccatgagctagttaaacttgtgaataaatggcaaaacatagcctataaatatgataaggacttgctgcttatgactcatttcataaccagaaacattacggataaccaagggaagaacaaaacagccatccatacctactttagctccgttttcttgggtggtgtagacagcttagttgacctgatgaacaagagttttccggaactaggtatcaagaaggaagattgtagagaaatgtcctggattgataccataatcttttacagcggagtcgtcaattatgacactgacaacttcaacaaggaaattttattagataggagtgcgggtcaaaatggggccttcaagatcaaactagactacgttaaaaaacccattcctgaaagtgtttttgttcagattctggagaagctgtatgaagaagatattggcgcgggtatgtacgtactttatccgtacggcggcataatggatgagattagtgaaagcgccatccctttcccccacagagctggtatcctgtacgagttgtggtatatctgctcctgggagaaacaggaggataacgaaaagcacttaaattggattaggaatatctacaatttcatgacgccctacgtttccaagaaccccaggttggcctatttgaactacagggatcttgatattggaatcaacgaccccaaaaacccaaacaactacacccaggcaaggatttggggagagaagtacttcgggaagaacttcgacaggctagttaaggtgaaaacgctagttgatccaaataattttttcagaaacgaacagagtatccctcccttaccgcgtcataggcac

SEQ ID NO: 1088 - DNA, 1548 bp, Artificial Sequence
  Synthetic
aatccaagagaaaatttcttgaagtgtttttctcagtatatcccgaataatgcgacgaaccttaacttagtatacactcagaacaaccctctatatatgagcgttctaaattctacaatccacaacctaagatttacgtccgacacgactccgaaacccctagttatagtgacaccgtcacatgttagccatatacaggcaaccatactatgtgccaaaaaacacgggttacaaatacgtacccgtagcgggggacacgacagtgaggggatgagttatattagtcaggtgcctttcgtcatagtggatttaagaaatatgaggtcaattaaaatcgacgttcactcacaaactgcctgggttcaagcgggggccacattgggtgaagtatattactggattaatgagaagaacgagaatctttcactagcagccggttattgtcccacagtcggcgccggcggtcactttggcggcggcggatacggtcccttaatgagaaagtacgggcttgccgcagacaatatcatagatgctcacttagttgatgttaatggaaaagtgttagaccgtaaaagcatgggggaggatctgttttgggcgcttagagggggaggggcagaatcatttggaataatagtggcatggaaaatcaggcttgtggctgttccaaagagtaccatgttctcagtaaagaaaataatggagatccatgagctagttaaacttgtgaataaatggcaaaacatagcctataaatatgataaggacttgctgcttatgactcatttcataaccagaaacattacggataaccaagggaagaacaaaacagccatccatacctactttagctccgttttcttgggtggtgtagacgaattagttgacctgatgaacaagagttttccggaactaggtatcaagaaggaagattgtagagaaatgtcctggattgataccataatcttttacagcggagtcgtcaattatgacactgacaacttcaacaaggaaattttattagataggagtgcgggtcaaaatggggccttcaagatcaaactagactacgttaaaaaacccattcctgaaagtgtttttgttcagattctggagaagctgtatgaagaagatattggcgcggggatgtacgtactttatccgtacggcggcataatggatgagattagtgaaagcgccatccctttcccccacagagctggtatcctgtacgagttgtggtatatctgctcctgggagaaacagacagataacgaaaagcacttaaattggattaggaatatctacaatttcatgacgccctacgtttccaagaaccccaggttggcctatttgaactacagggatcttgatattggaatcaacgaccccaaaaacccaaacaactacacccaggcaaggcaatggggagagaagtacttcgggaagaacttcgacaggctagttaaggtgaaaacgctagttgatccaaataattttttcagaaacgaacagagtatccctcccttaccgcgtcataggcac

SEQ ID NO: 1089 - DNA, 1548 bp, Artificial Sequence
  Synthetic
aatccaagagaaaatttcttgaagtgtttttctcagtatatcccgaataatgcgacgaaccttaacttagtatacactcagaacaaccctctatatatgagcgttctaaattctacaatccacaacctaagatttacgtccgacacgactccgaaacccctagttatagtgacaccgtcacatgttagccatatacaggctaccatactatgttccaaaaaagttgggttacaaatacgtacccgtagcgggggacacgacagtgaggggatgagttatattagtcaggtgcctttcgtcatagtggatttaagaaatatgaggtcaattaaaatcgacgttcactcacaaactgcctgggttgaggcgggggccacattgggtgaagtatattactgggtcaatgagaagaacgagaatctttcactagcagccggttattgtcccacagtctgcgccggcggtcactttggcggcggcggatacggtcccttaatgagaaattacgggcttgccgcagacaatatcatagatgctcacttagttgatgttaacggaaaagtgttagaccgtaaaagcatgggggaggatctgttttgggcgcttagagggggaggggcagaatcatttggaataatagtggcatggaaaatcaggcttgtggctgttccaaagagtaccatgttctcagtaaagaaaataatggagatccatgagctagttaaacttgtgaataaatggcaaaacatagcctataaatatgataaggacttgctgcttatgactcatttcataaccagaaacattacggataaccaagggaagaacaaaacagccatccatacctactttagctccgttttcttgggtggtgtagacagcttagttgacctgatgaacaagagttttccggaactaggtatcaagaaggaagattgtagagaaatgtcctggattgataccataatcttttacagcggagtcgtcaattatgacactgacaacttcaacaaggaaattttattagataggagtgcgggtcaaaatggggccttcaagatcaaactagactacgttaaaaaacccattcctgaaagtgtttttgttcagattctggagaagctgtatgaagaagatattggcgcggggatgtacgtactttatccgtacggcggcataatggatgagattagtgaaagcgccatccctttcccccacagagctggtatcctgtacgagttgtggtatatctgctcctgggagaaacaggaggataacgaaaagcacttaaattggattaggaatatctacaatttcatgacgccctacgtttccaagaaccccaggttggcctatttgaactacagggatcttgatattggaatcaacgaccccaaaaacccaaacaactacacccaggcaaggatttggggagagaagtacttcgggaagaacttcgacaggctagttaaggtgaaaacgctagttgatccaaataattttttcagaaacgaacagagtatccctcccttaccgcgtcataggcac

SEQ ID NO: 1090 - DNA, 1548 bp, Artificial Sequence
  Synthetic
aatccaagagaaaatttcttgaagtgtttttctcagtatatcccgaataatgcgacgaaccttaagttagtatacactcagaacaaccctctatatatgagcgttctaaattctacaatccacaacctaagatttacgtccgacacgactccgaaacccctagttatagtgacaccgtcacatgttagccatatacaggccaccatactatgttccaaaaaagttgggttacaaatacgtacccgtagcgggggacacgacagtgaggggatgagttatattagtcaggtgcctttcgtcatagtggatttaagaaatatgaggtcaattaaaatcgacgttcactcacaaactgcctgggttgaggcgggggccacattgggtgaagtatattactgggtcaatgagaagaacgagaatctttcactagcagccggttattgtcccacagtctgcgccggcggtcactttggcggcggcggatacggtcccttaatgagaaattacgggcttgccgcagacaatatcatagatgctcacttagttaatgttcatggaaaagtgttagaccgtaaaagcatgggggaggatctgttttgggcgcttagagggggaggggcagaatcatttggaataatagtggcatggaaaatcaggcttgtggctgttccaaagagtaccatgttctcagtaaagaaaataatggagatccatgagctagttaaacttgtgaataaatggcaaaacatagcctataaatatgataaggacttgctgcttatgactcatttcataaccagaaacattacggataaccaagggaagaacaaaacagccatccatacctactttagctccgttttcttgggtggtgtagacagcttagttgacctgatgaacaagagttttccggaactaggtatcaagaaggaagattgtagagaactttcctggattgataccataatcttttacagcggagtcgtcaattatgacactgacaacttcaacaaggaaattttattagataggagtgcgggtgtaaatggggccttcaagatcaaactagactacgttaaaaaacccattcctgaaagtgtttttgttcagattctggagaagctgtatgaagaagatattggcgcgggtatgtacgtactttatccgtacggcggcataatggatgagattagtgaaagcgccatccctttcccccacagagctggtatcctgtacgagttgtggtatatctgctcctgggagaaacaggaggataacgaaaagcacttaaattggattaggaatatctacaatttcatgacgccctacgtttccaagaaccccaggttggcctatttgaactacagggatcttgatattggaatcaacgaccccaaaaacccaaacaactacacccaggcaaggatttggggagagaagtacttcgggaagaacttcgacaggctagttaaggtgaaaacgctagttgatccaaataattttttcagaaacgaacagagtatccctcccttaccgcgtcataggcac

SEQ ID NO: 1091 - DNA, 1548 bp, Artificial Sequence
  Synthetic
aatccaagagaaaatttcttgaagtgtttttctcagtatatcccgaataatgcgacgaaccttaacttagtatacactcagaacaaccctctatatatgagcgttctaaattctacaatccaaaacctaagatttacgtccgacacgactccgaaacccctagttatagtgacaccgtcacatgttagccatatacaggcaaccatactatgttccaaaaaagttgggttacaaatacgtacccgtagcgggggacacgacagtgaggggatgagttatattagtcaggtgcctttcgtcatagtggatttaagaaatatgaggtcaattaaaatcgacgttcactcacaaactgcctgggttgaggcgggggccacattgggtgaagtatattactgggtcaatgagaagaacgagaatctttcactagcagccggttattgtcccacagtctgcgccggcggtcactttggcggcggcggatacggtcccttaatgagaaattacgggcttgccgcagacaatatcatagatgctcacttagttaatgttaacggaaaagtgttagaccgtaaaagcatgggggaggatctgttttgggcgcttagagggggaggggcagaatcatttggaataatagtggcatggaaaatcaggcttgtggctgttccaaagagtaccatgttctcagtaaagaaaataatggagatccatgagctagttaaacttgtgaataaatggcaaaacatagcctataaatatgataaggacttgctgcttatgactcatttcataaccagaaacattacggataaccaagggaagaacaaaacagccatccatacctactttagctccgttttcttgggtggtgtagacagcttagttgacctgatgaacaagagttttccggaactaggtatcaagaaggaagattgtagagaaatgtcctggattgataccataatcttttacagcggagtcgtcaattatgacactgacaacttcaacaaggaaattttattagataggagtgcgggtcaaaatggggccttcaagatcaaactagactacgttaaaaaacccattcctgaaagtgtttttgttcagattctggagaagctgtatgaagaagatattggcgcggggatgtacgtactttatccgtacggcggcataatggatgagattagtgaaagcgccatccctttcccccacagagctggtatcctgtacgagttgtggtatatctgctcctgggagaaacaggaggataacgaaaagcacttaaattggattaggaatatctacaatttcatgacgccctacgtttccaagaaccccaggttggcctatttgaactacagggatcttgatattggaatcaacgaccccaaaaacccaaacaactacacccaggcaaggatttggggagagaagtacttcgggaagaacttcgacaggctagttaaggtgaaaacgctagttgatccagataattttttcagaaacgaacagagtatccctcccttaccgcgtcataggcac

SEQ ID NO: 1092 - DNA, 1548 bp, Artificial Sequence
  Synthetic
aatccaagagaaaatttcttgaagtgtttttctcagtatatcccgaataatgcgacgaaccttaagttagtatacactcagaacaaccctctatatatgagcgttctaaattctacaatccacaacctaagatttacgtccgacacgactccgaaacccctagttatagtgacaccgtcacatgttagccatatacagggcaccatactatgttccaaaaaagttgggttacaaatacgtacccgtagcgggggacacgacagtgaggggatgagttatattagtcaggtgcctttcgtcatagtggatttaagaaatatgaggtcaattaaaatcgacgttcactcacaaactgcctgggttgaggcgggggccacattgggtgaagtatattactggattaatgagaagaacgagaatctttcactagcagccggttattgtcccacagtcggagccggcggtcactttggcggcggcggatacggtcccttaatgagaaagtacgggcttgccgcagacaatatcatagatgctcacttagttgatgttcatggaaaagtgttagaccgtaaaagcatgggggaggatctgttttgggcgcttagagggggaggggcagaatcatttggaataatagtggcatggaaaatcaggcttgtggctgttccaaagagtaccatgttctcagtaaagaaaataatggagatccatgagctagttaaacttgtgcataaatggcaaaacatagcctataaatatgataaggacttgctgcttatgactcatttcataaccagaaacattacggataaccaagggaagaacaaaacagccatccatacctactttagctccgttttcttgggtggtgtagacagcttagttgacctgatgaacaagagttttccggaactaggtatcaagaaggaagattgtagagaactttcctggattgataccataatcttttacagcggagtcgtcaattatgacactgacaacttcaacaaggaaattttattagataggagtgcgggtcaaaatggggccttcaagatcaaactagactacgttaaaaaacccattcctgaaagtgtttttgttcagattctggagaagctgtatgaagaagatattggtgcgggcatgtacgctctttatccgtacggcggcataatggatgagattagtgaaagcgccatccctttcccccacagagctggtatcctgtacgagttgtggtatatctgctcctgggagaaacaggaggataacgaaaagcacttaaattggattaggaatatctacaatttcatgacgccctacgtttccaagaaccccaggttggcctatttgaactacagggatcttgatattggaatcaacgaccccaaaaacccaaacaactacacccaggcaaggatttggggagagaagtacttcgggaagaacttcgacaggctagttaaggtgaaaacgctagttgatccaaataattttttcagaaacgaacagagtatccctcccttaccgcgtcataggcac

SEQ ID NO: 1093 - DNA, 1551 bp, Artificial Sequence
  Synthetic
aatcccagggagaactttcttaagtgtttcagtaaacatatcccaaataacgtggcgaatccgaaattagtatacacgcaaaacgattccctatattcgagcattctgaatagtaccattcaaaacttgcgctttatatcggacacaactccaaagcctttagtcatagttactccttcaaatgtttcccatattcaggctacaatcctctgctctaaaaaagttgggttgcaaatacgtactagatcaggaggccacgatgccgaaggtatgtcttatatctcccaagtgccattcgttgtcgtcgacttgaggaacatgcattctattaagattgatgtacactcccagaccgcatgggttgaagctggtgccacattaggtgaagtatactattggataaacgagaaaaatgaaaatttatcgtttcctggaggctattgtccaactgttggtgtcggtggtcatttctcaggcgggggctacggagcattgatgcgaaactacggactagcagctgataacattatagacgcccatctcgtgaatgtggatggtaaagttcttgatagaaagagcatgggtgaagatttgttttgggcgatcagaggcggtggaggggaaaactttggtattattgcggcttggaaaataaagctggtcgacgttccctcgaaagtaacaatcttttctgtaaagaaaaatatggaaatacatgggttggtcaagttattcaataaatggcaaaacattgcttataagtatgataaagacctcgttctgatgactcattttattacgaaaaatattaccgacaatcacggtaagaataaaactacagtgcacggttacttttcttcaattttccatggtggcgttgactctctagtagatttaatgaacaaaagtttccctgagttagggatcaagaaaacggattgtaaagaattttcttggatcgacacaaccatattctattcgggtgttgttaactttaataccgcaaactttaaaaaggaaattttgttagatcgctctgctggaaagaaaacagcatttagtatcaaacttgactatgtaaagaaaccgatacccgagactgccatggttaagatacttgagaagctatacgaagaggatgtgggagctggcatgtacgttctctacccttacggcggtataatggaagaaatttcagaatccgcaatcccattcccacacagagcaggtattatgtatgaactgtggtatactgcctcatgggagaaacaagaagataacgaaaaacacattaattgggtccgtagcgtctacaatttcactacaccatatgtatccaagaacccgagattggcttacttgaattatagagacttggatctaggaaaaaataatgaggagagcccgaataattatacacaggcaaggatttggggcgagaagtatttcggcaagaacttcaacagattagtaaaagttaagaccaaagttgaccccaataacttttttagaaatgaacaaagtatccctccactcccaccacatcatcat

SEQ ID NO: 1094 - DNA, 1548 bp, Artificial Sequence
  Synthetic
aatccaagagaaaatttcttgaagtgtttttctcagtatatcccgaataatgcgacgaaccttaagttagtatacactcagaacaaccctctatatatgagcgttctaaattctacaatccacaacctaagatttacgtccgacacgactccgaaacccctagttatagtgacaccgtcacatgttagccatatacaggccaccatactatgttccaaaaaagttgggttacaaatacgtacccgtagcgggggacacgacagtgaggggatgagttatattagtcaggtgcctttcgtcatagtggatttaagaaatatgaggtcaattaaaatcgacgttcactcacaaactgcctgggttcaagcgggggccacattgggtgaagtatattactgggtcaatgagaagaacgagaatctttcactagcagccggttattgtcccacagtctgcgccggcggtcactttggcggcggcggatacggtcccttaatgagaaattacgggcttgccgcagacaatatcatagatgctcacttagttaatgttcatggaaaagtgttagaccgtaaaagcatgggggaggatctgttttgggcgcttagagggggaggggcagaatcatttggaataatagtggcatggaaaatcaggcttgtggctgttccaaagagtaccatgttctcagtaaagaaaataatggagatccatgagctagttaaacttgtgaataaatggcaaaacatagcctataaatatgataaggacttgctgcttatgactcatttcataaccagaaacattacggataaccaagggaagaacaaaacagccatccatacctactttagctccgttttcttgggtggtgtagacagcttagttgacctgatgaacaagagttttccggaactaggtatcaagaaggaagattgtagagaactttcctggattgataccataatcttttacagcggagtcgtcaattatgacactgacaacttcaacaaggaaattttattagataggagtgcgggtcaaaatggggccttcaagatcaaactagactacgttaaaaaacccattcctgaaagtgtttttgttcagattctggagaagctgtatgaagaagatattggtgcgggtatgtacgtactttatccgtacggcggcataatggatgagattagtgaaagcgccatccctttcccccacagagctggtatcctgtacgagttgtggtatatctgctcctgggagaaacaggaggataacgaaaagcacttaaattggattaggaatatctacaatttcatgacgccctacgtttccaagaaccccaggttggcctatttgaactacagggatcttgatattggaatcaacgaccccaaaaacccaaacaactacacccaggcaaggatttggggagagaagtacttcgggaagaacttcgacaggctagttaaggtgaaaacgctagttgatccaaataattttttcagaaacgaacagagtatccctcccttaccgcgtcataggcac

SEQ ID NO: 1095 - DNA, 1548 bp, Artificial Sequence
  Synthetic
aatccaagagaaaatttcttgaagtgtttttctcagtatatcccgaataatgcgacgaaccttaacttagtatacactcagaacaaccctctatatatgagcgttctaaattctacaatccacaacctaagatttacgtccgacacgactccgaaacccctagttatagtgacaccgtcacatgttagccatatacaggcaaccatactatgttccaaaaaagttgggttacaaatacgtacccgtagcgggggacacgacgccgaggggatgagttatattagtcaggtgcctttcgtcatagtggatttaagaaatatgaggtcaattaaaatcgacgttcactcacaaactgcctgggttgaggcgggggccacattgggtgaagtatattactgggtcaatgagaagaacgagaatctttcactagcagccggttattgtcccacagtctgcgccggcggtcactttggcggcggcggatacggtcccttaatgagaaattacgggcttgccgcagacaatatcatagatgctcacttagttaatgttaacggaaaagtgttagaccgtaaaagcatgggggaggatctgttttgggcgcttagagggggaggggcagaatcatttggaataatagtggcatggaaaatcaggcttgtggctgttccaaagagtaccatgttctcagtaaagaaaataatggagatccatgagctagttaaacttgtgaataaatggcaaaacatagcctataaatatgataaggacttgctgcttatgactcatttcataaccagaaacattacggataaccaagggaagaacaaaacagccatccatacctactttagctccgttttcttgggtggtgtagacagcttagttgacctgatgaacaagagttttccggaactaggtatcaagaaggaagattgtagagaactttcctggattgataccataatcttttacagcggagtcgtcaattatgacactgacaacttcaacaaggaaattttattagataggagtgcgggtcaaaatggggccttcaagatcaaactagactacgttaaaaaacccattcctgaaagtgtttttgttcagattctggagaagctgtatgaagaagatattggtgcgggcatgtacgtactttatccgtacggcggcataatggatgagattagtgaaagcgccatccctttcccccacagagctggtatcctgtacgagttgtggtatatctgctcctgggagaaacaggaggataacgaaaagcacttaaattggattaggaatatctacaatttcatgacgccctacgtttccaagaaccccaggttggcctatttgaactacagggatcttgatattggaatcaacgaccccaaaaacccaaacaactacacccaggcaaggatttggggagagaagtacttcgggaagaacttcgacaggctagttaaggtgaaaacgctagttgatccaaataattttttcagaaacgaacagagtatccctcccttaccgcgtcataggcac

SEQ ID NO: 1096 - DNA, 1548 bp, Artificial Sequence
  Synthetic
aatccaagagaaaatttcttgaagtgtttttctcagtatatcccgaataatgcgacgaaccttaacttagtatacactcagaacaaccctctatatatgagcgttctaaattctacaatccaaaacctaagatttacgtccgacacgactccgaaacccctagttatagtgacaccgtcacatgttagccatatacaggcaaccatactatgtgccaaaaaagttgggttacaaatacgtacccgtagcgggggacacgacgctgaggggatgagttatattagtcaggtgcctttcgtcatagtggatttaagaaatatgaggtcaattaaaatcgacgttcactcacaaactgcctgggttgaggcgggggccacattgggtgaagtatattactgggtcaatgagaagaacgagaatctttcactagcagccggttattgtcccacagtctgcgccggcggtcactttggcggcggcggatacggtcccttaatgagaaattacgggcttgccgcagacaatatcatagatgctcacttagttaatgttaacggaaaagtgttagaccgtaaaagcatgggggaggatctgttttgggcgcttagagggggaggggcagaatcatttggaataatagtggcatggaaaatcaggcttgtggctgttccaaagagtaccatgttctcagtaaagaaaataatggagatccatgagctagttaaacttgtgaataaatggcaaaacatagcctataaatatgataaggacttgctgcttatgactcatttcataaccagaaacattacggataaccaagggaagaacaaaacagccatccatacctactttagctccgttttcttgggtggtgtagacagcttagttgacctgatgaacaagagttttccggaactaggtatcaagaaggaagattgtagagaaatgtcctggattgataccataatcttttacagcggagtcgtcaattatgacactgacaacttcaacaaggaaattttattagataggagtgcgggtcaaaatggggccttcaagatcaaactagactacgttaaaaaacccattcctgaaagtgtttttgttcagattctggagaagctgtatgaagaagatattggcgcggggatgtacgtcctttatccgtacggcggcataatggatgagattagtgaaagcgccatccctttcccccacagagctggtatcctgtacgagttgtggtatatctgctcctgggagaaacaggaggataacgaaaagcacttaaattggattaggaatatctacaatttcatgacgccctacgtttccaagaaccccaggttggcctatttgaactacagggatcttgatattggaatcaacgaccccaaaaacccaaacaactacacccaggcaaggatttggggagagaagtacttcgggaagaacttcgacaggctagttaaggtgaaaacgctagttgatccagataattttttcagaaacgaacagagtatccctcccttaccgcgtcataggcac

SEQ ID NO: 1097 - DNA, 1548 bp, Artificial Sequence
  Synthetic
aatccaagagaaaatttcttgaagtgtttttctcagtatatcccgaataatgcgacgaaccttaagttagtatacactcagaacaaccctctatatatgagcgttctaaattctacaatccacaacctaagatttacgtccgacacgactccgaaacccctagttatagtgacaccgtcacatgttagccatatacaggctaccatactatgttccaaaaaagttgggttacaaatacgtacccgtagcgggggacacgacagtgaggggatgagttatattagtcaggtgcctttcgtcatagtggatttaagaaatatgaggtcaattaaaatcgacgttcactcacaaactgcctgggttgaggcgggggccacattgggtgaagtatattactgggtcaatgagaagaacgagaatctttcactagcagccggttattgtcccacagtctgcgccggcggtcactttggcggcggcggatacggtcccttaatgagaaattacgggcttgccgcagacaatatcatagatgctcacttagttaatgttcatggaaaagtgttagaccgtaaaagcatgggggaggatctgttttgggcgcttagagggggaggggcagaatcatttggaataatagtggcatggaaaatcaggcttgtggctgttccaaagagtaccatgttctcagtaaagaaaataatggagatccatgagctagttaaacttgtgaataaatggcaaaacatagcctataaatatgataaggacttgctgcttatgactcatttcataaccagaaacattacggataaccaagggaagaacaaaacagccatccatacctactttagctccgttttcttgggtggtgtagacagcttagttgacctgatgaacaagagttttccggaactaggtatcaagaaggaagattgtagagaactttcctggattgataccataatcttttacagcggagtcgtcaattatgacactgacaacttcaacaaggaaattttattagataggagtgcgggtcggaatggggccttcaagatcaaactagactacgttaaaaaacccattcctgaaagtgtttttgttcagattctggagaagctgtatgaagaagatattggcgcgggtatgtacgtactttatccgtacggcggcataatggatgagattagtgaaagcgccatccctttcccccacagagctggtatcctgtacgagttgtggtatatctgctcctgggagaaacaggaggataacgaaaagcacttaaattggattaggaatatctacaatttcatgacgccctacgtttccaagaaccccaggttggcctatttgaactacagggatcttgatattggaatcaacgaccccaaaaacccaaacaactacacccaggcaaggatttggggagagaagtacttcgggaagaacttcgacaggctagttaaggtgaaaacgctagttgatccaaataattttttcagaaacgaacagagtatccctcccttaccgcgtcataggcac

SEQ ID NO: 1098 - DNA, 1548 bp, Artificial Sequence
  Synthetic
aatccaagagaaaatttcttgaagtgtttttctcagtatatcccgaataatgcgacgaaccttaacttagtatacactcagaacaaccctctatatatgagcgttctaaattctacaatccacaacctaagatttacgtccgacacgactccgaaacccctagttatagtgacaccgtcacatgttagccatatacaggccaccatactatgttccaaaaaagttgggttacaaatacgtacccgtagcgggggacacgacagtgaggggatgagttatattagtcaggtgcctttcgtcatagtggatttaagaaatatgaggtcaattaaaatcgacgttcactcacaaactgcctgggttgaggcgggggccacattgggtgaagtatattactgggtcaatgagaagaacgagaatctttcactagcagccggttattgtcccacagtctgcgccggcggtcactttggcggcggcggatacggtcccttaatgagaaattacgggcttgccgcagacaatatcatagatgctcacttagttaatgttaacggaaaagtgttagaccgtaaaagcatgggggaggatctgttttgggcgcttagagggggaggggcagaatcatttggaataatagtggcatggaaaatcaggcttgtggctgttccaaagagtaccatgttctcagtaaagaaaataatggagatccatgagctagttaaacttgtgaataaatggcaaaacatagcctataaatatgataaggacttgctgcttatgactcatttcataaccagaaacattacggataaccaagggaagaacaaaacagccatccatacctactttagctccgttttcttgggtggtgtagacagcttagttgacctgatgaacaagagttttccggaactaggtatcaagaaggaagattgtagagaaatgtcctggattgataccataatcttttacagcggagtcgtcaattatgacactgacaacttcaacaaggaaattttattagataggagtgcgggtcaaaatggggccttcaagatcaaactagactacgttaaaaaacccattcctgaaagtgtttttgttcagattctggagaagctgtatgaagaagatattggcgcggggatgtacgtcatgtatccgtacggcggcataatggatgagattagtgaaagcgccatccctttcccccacagagctggtatcctgtacgagttgtggtatatctgctcctgggagaaacaggaggataacgaaaagcacttaaattggattaggaatatctacaatttcatgacgccctacgtttccaagaaccccaggttggcctatttgaactacagggatcttgatattggaatcaacgaccccaaaaacccaaacaactacacccaggcaaggatttggggagagaagtacttcgggaagaacttcgacaggctagttaaggtgaaaacgctagttgatccaaataattttttcagaaacgaacagagtatccctcccttaccgcgtcataggcac

SEQ ID NO: 1099 - DNA, 1548 bp, Artificial Sequence; identical to SEQ ID NO: 390
  Synthetic

SEQ ID NO: 1100 - DNA, 1548 bp, Artificial Sequence
  Synthetic
aatccaagagaaaatttcttgaagtgtttttctcagtatatcccgaataatgcgacgaaccttaacttagtatacactcagaacaaccctctatatatgagcgttctaaattctacaatccacaacctaagatttacgtccgacacgactccgaaacccctagttatagtgacaccgtcacatgttagccatatacaggccaccatactatgttccaaaaaacatgggttacaaatacgtacccgtagcgggggacacgacagtgaggggatgagttatattagtcaggtgcctttcgtcatagtggatttaagaaatatgaggtcaattaaaatcgacgttcactcacaaactgcctgggttgaggcgggggccacattgggtgaagtatattactgggtcaatgagaagaacgagaatctttcactagcagccggttattgtcccacagtctgcgccggcggtcactttggcggcggcggatacggtcccttaatgagaaattacgggcttgccgcagacaatatcatagatgctcacttagttaatgttaacggaaaagtgttagaccgtaaaagcatgggggaggatctgttttgggcgcttagagggggaggggcagaatcatttggaataatagtggcatggaaaatcaggcttgtggctgttccaaagagtaccatgttctcagtaaagaaaataatggagatccatgagctagttaaacttgtgaataaatggcaaaacatagcctataaatatgataaggacttgctgcttatgactcatttcataaccagaaacattacggataaccaagggaagaacaaaacagccatccatacctactttagctccgttttcttgggtggtgtagacagcttagttgacctgatgaacaagagttttccggaactaggtatcaagaaggaagattgtagagaaatgtcctggattgataccataatcttttacagcggagtcgtcaattatgacactgacaacttcaacaaggaaattttattagataggagtgcgggtcaaaatggggccttcaagatcaaactagactacgttaaaaaacccattcctgaaagtgtttttgttcagattctggagaagctgtatgaagaagatattggcgcggggatgtacgtactttatccgtacggcggcataatggatgagattagtgaaagcgccatccctttcccccacagagctggtatcctgtacgagttgtggtatatctgctcctgggagaaacaggaggataacgaaaagcacttaaattggattaggaatatctacaatttcatgacgccctacgtttccaagaaccccaggttggcctatttgaactacagggatcttgatattggaatcaacgaccccaaaaacccaaacaactacacccaggcaaggatttggggagagaagtacttcgggaagaacttcgacaggctagttaaggtgaaaacgctagttgatccaaataattttttcagaaacgaacagagtatccctcccttaccgcgtcataggcac

SEQ ID NO: 1101 - DNA, 1548 bp, Artificial Sequence
  Synthetic
aatccaagagaaaatttcttgaagtgtttttctcagtatatcccgaataatgcgacgaaccttaagttagtatacactcagaacaaccctctatatatgagcgttctaaattctacaatccacaacctaagatttacgtccgacacgactccgaaacccctagttatagtgacaccgtcacatgttagccatatacaggcaaccatactatgttccaaaaaagttgggttacaaatacgtacccgtagcgggggacacgacagtgaggggatgagttatattagtcaggtgcctttcgtcatagtggatttaagaaatatgaggtcaattaaaatcgacgttcactcacaaactgcctgggttgaggcgggggccacattgggtgaagtatattactgggtcaatgagaagaacgagaatctttcactagcagccggttattgtcccacagtctgcgccggcggtcactttggcggcggcggatacggtcccttaatgagaaattacgggcttgccgcagacaatatcatagatgctcacttagttaatgttaacggaaaagtgttagaccgtaaaagcatgggggaggatctgttttgggcgcttagagggggaggggcagaatcatttggaataatagtggcatggaaaatcaggcttgtggctgttccaaagagtaccatgttctcagtaaagaaaataatggagatccatgagctagttaaacttgtgaataaatggcaaaacatagcctataaatatgataaggacttgctgcttatgactcatttcataaccagaaacattacggataaccaagggaagaacaaaacagccatccatacctactttagctccgttttcttgggtggtgtagacagcttagttgacctgatgaacaagagttttccggaactaggtatcaagaaggaagattgtagagaaatgtcctggattgataccataatcttttacagcggagtcgtcaattatgacactgacaacttcaacaaggaaattttattagataggagtgcgggtcaaaatggggccttcaagatcaaactagactacgttaaaaaacccattcctgaaagtgtttttgttcagattctggagaagctgtatgaagaagatattggtgcgggtatgtacgtactttatccgtacggcggcataatggatgagattagtgaaagcgccatccctttcccccacagagctggtatcctgtacgagttgtggtatatctgctcctgggagaaacaggaggataacgaaaagcacttaaattggattaggaatatctacaatttcatgacgccctacgtttccaagaaccccaggttggcctatttgaactacagggatcttgatattggaatcaacgaccccaaaaacccaaacaactacacccaggcaaggatttggggagagaagtacttcgggaagaacttcgacaggctagttaaggtgaaaacgctagttgatccaaataattttttcagaaacgaacagagtatccctcccttaccgcgtcataggcac

SEQ ID NO: 1102 - DNA, 1548 bp, Artificial Sequence
  Synthetic
aatccaagagaaaatttcttgaagtgtttttctcagtatatcccgaataatgcgacgaaccttaacttagtatacactcagaacaaccctctatatatgagcgttctaaattctacaatccacaacctaagatttacgtccgacacgactccgaaacccctagttatagtgacaccgtcacatgttagccatatacaggccaccatactatgttccaaaaaagttgggttacaaatacgtacccgtagcgggggacacgacagtgaggggatgagttatattagtcaggtgcctttcgtcatagtggatttaagaaatatgaggtcaattaaaatcgacgttcactcacaaactgcctgggttgaggcgggggccacattgggtgaagtatattactgggtcaatgagaagaacgagaatctttcactagcagccggtttttgtcccacagtctgcgccggcggtcactttggcggcggcggatacggtcccttaatgagaaattacgggcttgccgcagacaatatcatagatgctcacttagttaatgttaacggaaaagtgttagaccgtaaaagcatgggggaggatctgttttgggcgcttagagggggaggggcagaatcatttggaataatagtggcatggaaaatcaggcttgtggctgttccaaagagtaccatgttctcagtaaagaaaataatggagatccatgagctagttaaacttgtgaataaatggcaaaacatagcctataaatatgataaggacttgctgcttatgactcatttcataaccagaaacattacggataaccaagggaagaacaaaacagccatccatacctactttagctccgttttcttgggtggtgtagacagcttagttgacctgatgaacaagagttttccggaactaggtatcaagaaggaagattgtagagaaatgtcctggattgataccataatcttttacagcggagtcgtcaattatgacactgacaacttcaacaaggaaattttattagataggagtgcgggtcaaaatggggccttcaagatcaaactagactacgttaaaaaacccattcctgaaagtgtttttgttcagattctggagaagctgtatgaagaagatattggcgcggggatgtacgtactttatccgtacggcggcataatggatgagattagtgaaagcgccatccctttcccccacagagctggtatcctgtacgagttgtggtatatctgctcctgggagaaacaggaggataacgaaaagcacttaaattggattaggaatatctacaatttcatgacgccctacgtttccaagaaccccaggttggcctatttgaactacagggatcttgatattggaatcaacgaccccaaaaacccaaacaactacacccaggcaaggatttggggagagaagtacttcgggaagaacttcgacaggctagttaaggtgaaaacgctagttgatccaaataattttttcagaaacgaacagagtatccctcccttaccgcgtcataggcac

SEQ ID NO: 1103 - DNA, 1548 bp, Artificial Sequence
  Synthetic
aatccaagagaaaatttcttgaagtgtttttctcagtatatcccgaataatgcgacgaaccttaagttagtatacactcagaacaaccctctatatatgagcgttctaaattctacaatccacaacctaagatttacgtccgacacgactccgaaacccctagttatagtgacaccgtcacatgttagccatatacagggcaccatactatgttccaaaaaagttgggttacaaatacgtacccgtagcgggggacacgacagtgaggggatgagttatattagtcaggtgcctttcgtcatagtggatttaagaaatatgaggtcaattaaaatcgacgttcactcacaaactgcctgggttgaggcgggggccacattgggtgaagtatattactgggtcaatgagaagaacgagaatctttcactagcagccggttattgtcccacagtctgcgccggcggtcactttggcggcggcggatacggtcccttaatgagaaattacgggcttgccgcagacaatatcatagatgctcacttagttgatgttcatggaaaagtgttagaccgtaaaagcatgggggaggatctgttttgggcgcttagagggggaggggcagaatcatttggaataatagtggcatggaaaatcaggcttgtggctgttccaaagagtaccatgttctcagtaaagaaaataatggagatccatgagctagttaaacttgtgaataaatggcaaaacatagcctataaatatgataaggacttgctgcttatgactcatttcataaccagaaacattacggataaccaagggaagaacaaaacagccatccatacctactttagctccgttttcttgggtggtgtagacagcttagttgacctgatgaacaagagttttccggaactaggtatcaagaaggaagattgtagagaactttcctggattgataccataatcttttacagcggagtcgtcaattatgacactgacaacttcaacaaggaaattttattagataggagtgcgggtcaaaatggggccttcaagatcaaactagactacgttaaaaaacccattcctgaaagtgtttttgttcagattctggagaagctgtatgaagaagatattggtgcgggaatgtacgctctttatccgtacggcggcataatggatgagattagtgaaagcgccatccctttcccccacagagctggtatcctgtacgagttgtggtatatctgctcctgggagaaacaggaggataacgaaaagcacttaaattggattaggaatatctacaatttcatgacgccctacgtttccaagaaccccaggttggcctatttgaactacagggatcttgatattggaatcaacgaccccaaaaacccaaacaactacacccaggcaaggatttggggagagaagtacttcgggaagaacttcgacaggctagttaaggtgaaaacgctagttgatccaaataattttttcagaaacgaacagagtatccctcccttaccgcgtcataggcac

SEQ ID NO: 1104 - DNA, 1548 bp, Artificial Sequence
  Synthetic
aatccaagagaaaatttcttgaagtgtttttctcagtatatcccgaataatgcgacgaaccttaagttagtatacactcagaacaaccctctatatatgagcgttctaaattctacaatccacaacctaagatttacgtccgacacgactccgaaacccctagttatagtgacaccgtcacatgttagccatatacaggccaccatactatgtgcaaaaaaagttgggttacaaatacgtacccgtagcgggggacacgacagtgaggggatgagttatattagtcaggtgcctttcgtcatagtggatttaagaaatatgaggtcaattaaaatcgacgttcactcacaaactgcctgggttgaggcgggggccacattgggtgaagtatattactgggtcaatgagaagaacgagaatctttcactagcagccggttattgtcccacagtctgcgccggcggtcactttggcggcggcggatacggtcccttaatgagaaattacgggcttgccgcagacaatatcatagatgctcacttagttaatgttcatggaaaagtgttagaccgtaaaagcatgggggaggatctgttttgggcgcttagagggggaggggcagaatcatttggaataatagtggcatggaaaatcaggcttgtggctgttccaaagagtaccatgttctcagtaaagaaaataatggagatccatgagctagttaaacttgtgaataaatggcaaaacatagcctataaatatgataaggacttgctgcttatgactcatttcataaccagaaacattacggataaccaagggaagaacaaaacagccatccatacctactttagctccgttttcttgggtggtgtagacagcttagttgacctgatgaacaagagttttccggaactaggtatcaagaaggaagattgtagagaactttcctggattgataccataatcttttacagcggagtcgtcaattatgacactgacaacttcaacaaggaaattttattagataggagtgcgggtcaaaatggggccttcaagatcaaactagactacgttaaaaaacccattcctgaaagtgtttttgttcagattctggagaagctgtatgaagaagatattggcgcgggtatgtacgtcctttatccgtacggcggcataatggatgagattagtgaaagcgccatccctttcccccacagagctggtatcctgtacgagttgtggtatatctgctcctgggagaaacaggaggataacgaaaagcacttaaattggattaggaatatctacaatttcatgacgccctacgtttccaagaaccccaggttggcctatttgaactacagggatcttgatattggaatcaacgaccccaaaaacccaaacaactacacccaggcaaggatttggggagagaagtacttcgggaagaacttcgacaggctagttaaggtgaaaacgctagttgatccaaataattttttcagaaacgaacagagtatccctcccttaccgcgtcataggcac

SEQ ID NO: 1105 - DNA, 1548 bp, Artificial Sequence
  Synthetic
aatccaagagaaaatttcttgaagtgtttttctcagtatatcccgaataatgcgacgaaccttaacttagtatacactcagaacaaccctctatatatgagcgttctaaattctacaatccacaacctaagatttacgtccgacacgactccgaaacccctagttatagtgacaccgtcacatgttagccatatacagggcaccatactatgttccaaaaaagttgggttacaaatacgtacccgtagcgggggacacgacagtgaggggatgagttatattagtcaggtgcctttcgtcatagtggatttaagaaatatgaggtcaattaaaatcgacgttcactcacaaactgcctgggttgaggcgggggccacattgggtgaagtatattactgggtcaatgagaagaacgagaatctttcactagcagccggttattgtcccacagtctgcgccggcggtcactttggcggcggcggatacggtcccttaatgagaaagtacgggcttgccgcagacaatatcatagatgctcacttagttaatgttaacggaaaagtgttagaccgtaaaagcatgggggaggatctgttttgggcgcttagagggggaggggcagaatcatttggaataatagtggcatggaaaatcaggcttgtggctgttccaaagagtaccatgttctcagtaaagaaaataatggagatccatgagctagttaaacttgtgaataaatggcaaaacatagcctataaatatgataaggacttgctgcttatgactcatttcataaccagaaacattacggataaccaagggaagaacaaaacagccatccatacctactttagctccgttttcttgggtggtgtagacagcttagttgacctgatgaacaagagttttccggaactaggtatcaagaaggaagattgtagagaaatgtcctggattgataccataatcttttacagcggagtcgtcaattatgacactgacaacttcaacaaggaaattttattagataggagtgcgggtcaaaatggggccttcaagatcaaactagactacgttaaaaaacccattcctgaaagtgtttttgttcagattctggagaagctgtatgaagaagatattggcgcggggatgtacgctctttatccgtacggcggcataatggatgagattagtgaaagcgccatccctttcccccacagagctggtatcctgtacgagttgtggtatatctgctcctgggagaaacaggaggataacgaaaagcacttaaattggattaggaatatctacaatttcatgacgccctacgtttccaagaaccccaggttggcctatttgaactacagggatcttgatattggaatcaacgaccccaaaaacccaaacaactacacccaggcaaggatttggggagagaagtacttcgggaagaacttcgacaggctagttaaggtgaaaacgctagttgatccaaataattttttcagaaacgaacagagtatccctcccttaccgcgtcataggcac

SEQ ID NO: 1106 - DNA, 1548 bp, Artificial Sequence
  Synthetic
aatccaagagaaaatttcttgaagtgtttttctcagtatatcccgaataatgcgacgaaccttaacttagtatacactcagaacaaccctctatatatgagcgttctaaattctacaatccacaacctaagatttacgtccgacacgactccgaaacccctagttatagtgacaccgtcacatgttagccatatacaggcaaccatactatgttccaaaaaagttgggttacaaatacgtacccgtagcgggggacacgacagtgaggggatgagttatattagtcaggtgcctttcgtcatagtggatttaagaaatatgaggtcaattaaaatcgacgttcactcacaaactgcctgggttgaggcgggggccacattgggtgaagtatattactgggtcaatgagaagaacgagaatctttcactagcagccggttattgtcccacagtctgcgccggcggtcactttggcggcggcggatacggtcccttaatgagaaattacgggcttgccgcagacaatatcatagatgctcacttagttaatgttaacggaaaagtgttagaccgtaaaagcatgggggaggatctgttttgggcgcttagagggggaggggcagaatcatttggaataatagtggcatggaaaatcaggcttgtggctgttccaaagagtaccatgttctcagtaaagaaaataatggagatccatgagctagttaaacttgtgaataaatggcaaaacatagcctataaatatgataaggacttgctgcttatgactcatttcataaccagaaacattacggataaccaagggaagaacaaaacagccatccatacctactttagctccgttttcttgggtggtgtagacagcttagttgacctgatgaacaagagttttccggaactaggtatcaagaaggaagattgtagagaaatgtcctggattgataccataatcttttacagcggagtcgtcaattatgacactgacaacttcaacaaggaaattttattagataggagtgcgggtcaaaatggggccttcaagatcaaactagactacgttaaaaaacccattcctgaaagtgtttttgttcagattctggagaagctgtatgaagaagatattggtgcgggtatgtacgtgctttatccgtacggcggcataatggatgagattagtgaaagcgccatccctttcccccacagagctggtatcctgtacgagttgtggtatatctgctcctgggagaaacaggaggataacgaaaagcacttaaattggattaggaatatctacaatttcatgacgccctacgtttccaagaaccccaggttggcctatttgaactacagggatcttgatattggaatcaacgaccccaaaaacccaaacaactacacccaggcaaggatttggggagagaagtacttcgggaagaacttcgacaggctagttaaggtgaaaacgctagttgatccagataattttttcagaaacgaacagagtatccctcccttaccgcgtcataggcac

SEQ ID NO: 1107 - DNA, 1548 bp, Artificial Sequence
  Synthetic
aatccaagagaaaatttcttgaagtgtttttctcagtatatcccgaataatgcgacgaaccttaagttagtatacactcagaacaaccctctatatatgagcgttctaaattctacaatccacaacctaagatttacgtccgacacgactccgaaacccctagttatagtgacaccgtcacatgttagccatatacaggccaccatactatgttccaaaaaagttgggttacaaatacgtacccgtagcgggggacacgacagtgaggggatgagttatattagtcaggtgcctttcgtcatagtggatttaagaaatatgaggtcaattaaaatcgacgttcactcacaaactgcctgggttgaggcgggggccacattgggtgaagtatattactgggtcaatgagaagaacgagaatctttcactagcagccggttattgtcccacagtctgcgccggcggtcactttggcggcggcggatacggtcccttaatgagaaattacgggcttgccgcagacaatatcatagatgctcacttagttaatgttcatggaaaagtgttagaccgtaaaagcatgggggaggatctgttttgggcgcttagagggggaggggcagaatcatttggaataatagtggcatggaaaatcaggcttgtggctgttccaaagagtaccatgttctcagtaaagaaaataatggagatccatgagctagttaaacttgtgaataaatggcaaaacatagcctataaatatgataaggacttgctgcttatgactcatttcataaccagaaacattacggataaccaagggaagaacaaaacagccatccatacctactttagctccgttttcttgggtggtgtagacagcttagttgacctgatgaacaagagttttccggaactaggtatcaagaaggaagattgtagagaactttcctggattgataccataatcttttacagcggagtcgtcaattatgacactgacaacttcaacaaggaaattttattagataggagtgcgggtcaaaatggggccttcaagatcaaactagactacgttaaaaaacccattcctgaaagtgtttttgttcagattctggagaagctgtatgaagaagatattggtgcgggcatgtacgtcctttatccgtacggcggcataatggatgagattagtgaaagcgccatccctttcccccacagagctggtatcctgtacgagttgtggtatatctgctcctgggagaaacaggaggataacgaaaagcacttaaattggattaggaatatctacaatttcatgacgccctacgtttccaagaaccccaggttggcctatttgaactacagggatcttgatattggaatcaacgaccccaaaaacccaaacaactacacccaggcaaggatttggggagagaagtacttcgggaagaacttcgacaggctagttaaggtgaaaacgctagttgatccaaataattttttcagaaacgaacagagtatccctcccttaccgcgtatgaggcac

SEQ ID NO: 1108 - DNA, 1548 bp, Artificial Sequence
  Synthetic
aatccaagagaaaatttcttgaagtgtttttctcagtatatcccgaataatgcgacgaaccttaacttagtatacactcagaacaaccctctatatatgagcgttctaaattctacaatccacaacctaagatttacgtccgacacgactccgaaacccctagttatagtgacaccgtcacatgttagccatatacaggccaccatactatgttccaaaaaagttgggttacaaatacgtacccgtagcgggggacacgacagtgaggggatgagttatattagtcaggtgcctttcgtcatagtggatttaagaaatatgaggtcaattaaaatcgacgttcactcacaaactgcctgggttgaggcgggggccacattgggtgaagtatattactgggtcaatgagaagaacgagaatctttcactagcagccggttattgtcccacagtctgcgccggcggtcactttggcggcggcggatacggtcccttaatgagaaattacgggcttgccgcagacaatatcatagatgctcacttagttaatgttaacggaaaagtgttagaccgtaaaagcatgggggaggatctgttttgggcgcttagagggggaggggcagaatcatttggaataatagtggcatggaaaatcaggcttgtggctgttccaaagagtaccatgttctcagtaaagaaaataatggagatccatgagctagttaaacttgtgaataaatggcaaaacatagcctataaatatgataaggacttgctgcttatggctcatttcataaccagaaacattacggataaccaagggaagaacaaaacagccatccatacctactttagctccgttttcttgggtggtgtagacagcttagttgacctgatgaacaagagttttccggaactaggtatcaagaaggaagattgtagagaaatgtcctggattgataccataatcttttacagcggagtcgtcaattatgacactgacaacttcaacaaggaaattttattagataggagtgcgggtcaaaatggggccttcaagatcaaactagactacgttaaaaaacccattcctgaaagtgtttttgttcagattctggagaagctgtatgaagaagatattggcgcggggatgtacgtcctttatccgtacggcggcataatggatgagattagtgaaagcgccatccctttcccccacagagctggtatcctgtacgagttgtggtatatctgctcctgggagaaacaggaggataacgaaaagcacttaaattggattaggaatatctacaatttcatgacgccctacgtttccaagaaccccaggttggcctatttgaactacagggatcttgatattggaatcaacgaccccaaaaacccaaacaactacacccaggcaaggatttggggagagaagtacttcgggaagaacttcgacaggctagttaaggtgaaaacgctagttgatccaaataattttttcagaaacgaacagagtatccctcccttaccgcgtcataggcac

SEQ ID NO: 1109 - DNA, 1548 bp, Artificial Sequence
  Synthetic
aatccaagagaaaatttcttgaagtgtttttctcagtatatcccgaataatgcgacgaaccttaacttagtatacactcagaacaaccctctatatatgagcgttctaaattctacaatccacaacctaagatttacgtccgacacgactccgaaacccctagttatagtgacaccgtcacatgttagccatatacagggcaccatactatgttccaaaaaagttgggttacaaatacgtacccgtagcgggggacacgacagtgaggggatgagttatattagtcaggtgcctttcgtcatagtggatttaagaaatatgaggtcaattaaaatcgacgttcactcacaaactgcctgggttgaggcgggggccacattgggtgaagtatattactgggtcaatgagaagaacgagaatctttcactagcagccggttattgtcccacagtctgcgccggcggtcactttggcggcggcggatacggtcccttaatgagaaattacgggcttgccgcagacaatatcatagatgctcacttagttaatgttaacggaaaagtgttagaccgtaaaagcatgggggaggatctgttttgggcgattagagggggaggggcagaatcatttggaataatagtggcatggaaaatcaggcttgtggctgttccaaagagtaccatgttctcagtaaagaaaataatggagatccatgagctagttaaacttgtgaataaatggcaaaacatagcctataaatatgataaggacttgctgcttatgactcatttcataaccagaaacattacggataaccaagggaagaacaaaacagccatccatacctactttagctccgttttcttgggtggtgtagacagcttagttgacctgatgaacaagagttttccggaactaggtatcaagaaggaagattgtagagaaatgtcctggattgataccataatcttttacagcggagtcgtcaattatgacactgacaacttcaacaaggaaattttattagataggagtgcgggtcaaaatggggccttcaagatcaaactagactacgttaaaaaacccattcctgaaagtgtttttgttcagattctggagaagctgtatgaagaagatattggcgcggggatgtacgctctttatccgtacggcggcataatggatgagattagtgaaagcgccatccctttcccccacagagctggtatcctgtacgagttgtggtatatctgctcctgggagaaacaggaggataacgaaaagcacttaaattggattaggaatatctacaatttcatgacgccctacgtttccaagaaccccaggttggcctatttgaactacagggatcttgatattggaatcaacgaccccaaaaacccaaacaactacacccaggcaaggatttggggagagaagtacttcgggaagaacttcgacaggctagttaaggtgaaaacgctagttgatccaaataattttttcagaaacgaacagagtatccctcccttaccgcgtcataggcac

SEQ ID NO: 1110 - DNA, 1548 bp, Artificial Sequence
  Synthetic
aatccaagagaaaatttcttgaagtgtttttctcagtatatcccgaataatgcgacgaaccttaagttagtatacactcagaacaaccctctatatatgagcgttctaaattctacaatccacaacctaagatttacgtccgacacgactccgaaacccctagttatagtgacaccgtcacatgttagccatatacaggcaaccatactatgttccaaaaaagttgggttacaaatacgtacccgtagcgggggacacgacagtgaggggatgagttatattagtcaggtgcctttcgtcatagtggatttaagaaatatgaggtcaattaaaatcgacgttcactcacaaactgcctgggttgaggcgggggccacattgggtgaagtatattactgggtcaatgagaagaacgagaatctttcactacctgccggttattgtcccacagtctgcgccggcggtcactttggcggcggcggatacggtcccttaatgagaaattacgggcttgccgcagacaatatcatagatgctcacttagttaatgttcatggaaaagtgttagaccgtaaaagcatgggggaggatctgttttgggcgcttagagggggaggggcagaatcatttggaataatagtggcatggaaaatcaggcttgtggctgttccaaagagtaccatgttctcagtaaagaaaataatggagatccatgagctagttaaacttgtgaataaatggcaaaacatagcctataaatatgataaggacttgctgcttatgactcatttcataaccagaaacattacggataaccaagggaagaacaaaacagccatccatacctactttagctccgttttcttgggtggtgtagacagcttagttgacctgatgaacaagagttttccggaactaggtatcaagaaggaagattgtagagaactttcctggattgataccataatcttttacagcggagtcgtcaattatgacactgacaacttcaacaaggaaattttattagataggagtgcgggtcaaaatggggccttcaagatcaaactagactacgttaaaaaacccattcctgaaagtgtttttgttcagattctggagaagctgtatgaagaagatattggtgcgggcatgtacgtactttatccgtacggcggcataatggatgagattagtgaaagcgccatccctttcccccacagagctggtatcctgtacgagttgtggtatatctgctcctgggagaaacaggaggataacgaaaagcacttaaattggattaggaatatctacaatttcatgacgccctacgtttccaagaaccccaggttggcctatttgaactacagggatcttgatattggaatcaacgaccccaaaaacccaaacaactacacccaggcaaggatttggggagagaagtacttcgggaagaacttcgacaggctagttaaggtgaaaacgctagttgatccaaataattttttcagaaacgaacagagtatccctcccttaccgcgtcataggcac

SEQ ID NO: 1111 - DNA, 1548 bp, Artificial Sequence
  Synthetic
aatccaagagaaaatttcttgaagtgtttttctcagtatatcccgaataatgcgacgaaccttaacttagtatacactcagaacaaccctctatatatgagcgttctaaattctacaatccacaacctaagatttacgtccgacacgactccgaaacccctagttatagtgacaccgtcacatgttagccatatacaggcaaccatactatgttccaaaaaagttgggttacaaatacgtacccgtagcgggggacacgacagtgaggggatgagttatattagtcaggtgcctttcgtcatagtggatttaagaaatatgaggtcaattaaaatcgacgttcactcacaaactgcctgggttgaggcgggggccacattgggtgaagtatattactgggtcaatgagaagaacgagaatctttcactagcagccggttattgtcccacagtctgcgccggcggtcactttggcggcggcggatacggtcccttaatgagaaattacgggcttgccgcagacaatatcatagatgctcacttagttaatgttaacggaaaagtgttagaccgtaaaagcatgggggaggatctgttttgggcgcttagagggggaggggcagaatcatttggaataatagtggcatggaaaatcaggcttgtggctgttccaaagagtaccatgttctcagtaaagaaaataatggagatccatgagctagttaaacttgtgaataaatggcaaaacatagcctataaatatgataaggacttgctgcttatgactcatttcataaccagaaacattacggataaccaagggaagaacaaaacagccatccatacctactttagctccgttttcttgggtggtgtagacagcttagttgacctgatgaacaagagttttccggaactaggtatcaagaaggaagattgtagagaactttcctggattgataccataatcttttacagcggagtcgtcaattatgacactgacaacttcaacaaggaaattttattagataggagtgcgggtcaaaatggggccttcaagatcaaactagactacgttaaaaaacccattcctgaaagtgtttttgttcagattctggagaagctgtatgaagaagatattggtgcgggtatgtacgtactttatccgtacggcggcataatggatgagattagtgaaagcgccatccctttcccccacagagctggtatcctgtacgagttgtggtatatctgctcctgggagaaacaggaggataacgaaaagcacttaaattggattaggaatatctacaatttcatgacgccctacgtttccaagaaccccaggttggcctatttgaactacagggatcttgatattggaatcaacgaccccaaaaacccaaacaactacacccaggcaaggatttggggagagaagtacttcgggaagaacttcgacaggctagttaaggtgaaaacgctagttgatccagataattttttcagaaacgaacagagtatccctcccttaccgcgtcataggcac

SEQ ID NO: 1112 - DNA, 1548 bp, Artificial Sequence
  Synthetic
aatccaagagaaaatttcttgaagtgtttttctcagtatatcccgaataatgcgacgaaccttaagttagtatacactcagaacaaccctctatatatgagcgttctaaattctacaatccacaacctaagatttacgtccgacacgactccgaaacccctagttatagtgacaccgtcacatgttagccatatacaggctaccatactatgttccaaaaaagttgggttacaaatacgtacccgtagcgggggacacgacagtgaggggatgagttatattagtcaggtgcctttcgtcatagtggatttaagaaatatgaggtcaattaaaatcgacgttcactcacaaactgcctgggttgaggcgggggccacattgggtgaagtatattactgggtcaatgagaagaacgagaatctttcactagcagccggttattgtcccacagtctgcgccggcggtcactttggcggcggcggatacggtcccttaatgagaaattacgggcttgccgcagacaatatcatagatgctcacttagttaatgttcatggaaaagtgttagaccgtaaaagcatgggggaggatctgttttgggcgcttagagggggaggggcagaatcatttggaataatagtggcatggaaaatcaggcttgtggctgttccaaagagtaccatgttctcagtaaagaaaataatggagatccatgagctagttaaacttgtgaataaatggcaaaacatagcctataaatatgataaggacttgctgcttatgactcatttcataaccagaaacattacggataaccaagggaagaacaaaacagccatccatacctactttagctccgttttcttgggtggtgtagacagcttagttgacctgatgaacaagagttttccggaactaggtatcaagaaggaagattgtagagaactttcctggattgataccataatcttttacagcggagtcgtcaattatgacactgacaacttcaacaaggaaattttattagataggagtgcgggtacaaatggggccttcaagatcaaactagactacgttaaaaaacccattcctgaaagtgtttttgttcagattctggagaagctgtatgaagaagatattggtgcgggtatgtacgtactttatccgtacggcggcataatggatgagattagtgaaagcgccatccctttcccccacagagctggtatcctgtacgagttgtggtatatctgctcctgggagaaacaggaggataacgaaaagcacttaaattggattaggaatatctacaatttcatgacgccctacgtttccaagaaccccaggttggcctatttgaactacagggatcttgatattggaatcaacgaccccaaaaacccaaacaactacacccaggcaaggatttggggagagaagtacttcgggaagaacttcgacaggctagttaaggtgaaaacgctagttgatccaaataattttttcagaaacgaacagagtatccctcccttaccgcgtcataggcac

SEQ ID NO: 1113 - DNA, 1548 bp, Artificial Sequence
  Synthetic
aatccaagagaaaatttcttgaagtgtttttctcagtatatcccgaataatgcgacgaaccttaagttagtatacactcagaacaaccctctatatatgagcgttctaaattctacaatccacaacctaagatttacgtccgacacgactccgaaacccctagttatagtgacaccgtcacatgttagccatatacaggctaccatactatgttccaaaaaagttgggttacaaatacgtacccgtagcgggggacacgacagtgaggggatgagttatattagtcaggtgcctttcgtcatagtggatttaagaaatatgaggtcaattaaaatcgacgttcactcacaaactgcctgggttgaggcgggggccacattgggtgaagtatattactgggtcaatgagaagaacgagaatctttcactagcagccggttattgtcccacagtctgcgccggcggtcactttggcggcggcggatacggtcccttaatgagaaattacgggcttgccgcagacaatatcatagatgctcacttagttaatgttcatggaaaagtgttagaccgtaaaagcatgggggaggatctgttttgggcgcttagagggggaggggcagaatcatttggaataatagtggcatggaaaatcaggcttgtggctgttccaaagagtaccatgttctcagtaaagaaaataatggagatccatgagctagttaaacttgtgaataaatggcaaaacatagcctataaatatgataaggacttgctgcttatgactcatttcataaccagaaacattacggataaccaagggaagaacaaaacagccatccatacctactttagctccgttttcttgggtggtgtagacagcttagttgacctgatgaacaagagttttccggaactaggtatcaagaaggaagattgtagagaactttcctggattgataccataatcttttacagcggagtcgtcaattatgacactgacaacttcaacaaggaaattttattagataggagtgcgggtcaaaatggggccttcaagatcaaactagactacgttaaaaaacccattcctgaaagtgtttttgttcagattctggagaagctgtatgaagaagatattggcgcgggaatgtacgtcctttatccgtacggcggcataatggatgagattagtgaaagcgccatccctttcccccacagagctggtatcctgtacgagttgtggtatatctgctcctgggagaaacaggaggataacgaaaagcacttaaattggattaggaatatctacaatttcatgacgccctacgtttccaagaaccccaggttgtcttatttgaactacagggatcttgatattggaatcaacgaccccaaaaacccaaacaactacacccaggcaaggatttggggagagaagtacttcgggaagaacttcgacaggctagttaaggtgaaaacgctagttgatccaaataattttttcagaaacgaacagagtatccctcccttaccgcgtcataggcac

SEQ ID NO: 1114 - DNA, 1548 bp, Artificial Sequence
  Synthetic
aatccaagagaaaatttcttgaagtgtttttctcagtatatcccgaataatgcgacgaaccttaagttagtatacactcagaacaaccctctatatatgagcgttctaaattctacaatccacaacctaagatttacgtccgacacgactccgaaacccctagttatagtgacaccgtcacatgttagccatatacagggcaccatactatgttccaaaaaagttgggttacaaatacgtacccgtagcgggggacacgacgcagaggggatgagttatattagtcaggtgcctttcgtcatagtggatttaagaaatatgaggtcaattaaaatcgacgttcactcacaaactgcctgggttgaggcgggggccacattgggtgaagtatattactgggtcaatgagaagaacgagaatctttcactagcagccggttattgtcccacagtctgcgccggcggtcactttggcggcggcggatacggtcccttaatgagaaattacgggcttgccgcagacaatatcatagatgctcacttagttaatgttaacggaaaagtgttagaccgtaaaagcatgggggaggatctgttttgggcgcttagagggggaggggcagaatcatttggaataatagtggcatggaaaatcaggcttgtggctgttccaaagagtaccatgttctcagtaaagaaaataatggagatccatgagctagttaaacttgtgaataaatggcaaaacatagcctataaatatgataaggacttgctgcttatgactcatttcataaccagaaacattacggataaccaagggaagaacaaaacagccatccatacctactttagctccgttttcttgggtggtgtagacagcttagttgacctgatgaacaagagttttccggaactaggtatcaagaaggaagattgtagagaactttcctggattgataccataatcttttacagcggagtcgtcaattatgacactgacaacttcaacaaggaaattttattagataggagtgcgggtcaaaatggggccttcaagatcaaactagactacgttaaaaaacccattcctgaaagtgtttttgttcagattctggagaagctgtatgaagaagatattggtgcgggtatgtacgctctttatccgtacggcggcataatggatgagattagtgaaagcgccatccctttcccccacagagctggtatcctgtacgagttgtggtatatctgctcctgggagaaacaggaggataacgaaaagcacttaaattggattaggaatatctacaatttcatgacgccctacgtttccaagaaccccaggttggcctatttgaactacagggatcttgatattggaatcaacgaccccaaaaacccaaacaactacacccaggcaaggatttggggagagaagtacttcgggaagaacttcgacaggctagttaaggtgaaaacgctagttgatccaaataattttttcagaaacgaacagagtatccctcccttaccgcgtcataggcac

SEQ ID NO: 1115 - DNA, 1548 bp, Artificial Sequence
  Synthetic
aatccaagagaaaatttcttgaagtgtttttctcagtatatcccgaataatgcgacgaaccttaacttagtatacactcagaacaaccctctatatatgagcgttctaaattctacaatccacaacctaagatttacgtccgacacgactccgaaacccctagttatagtgacaccgtcacaagttagccatatacaggcaaccatactatgttccaaaaaagttgggttacaaatacgtacccgtagcgggggacacgacagtgaggggatgagttatattagtcaggtgcctttcgtcatagtggatttaagaaatatgaggtcaattaaaatcgacgttcactcacaaactgcctgggttgaggcgggggccacattgggtgaagtatattactgggtcaatgagaagaacgagaatctttcactagcagccggttattgtcccacagtctgcgccggcggtcactttggcggcggcggatacggtcccttaatgagaaattacgggcttgccgcagacaatatcatagatgctcacttagttaatgttaacggaaaagtgttagaccgtaaaagcatgggggaggatctgttttgggcgcttagagggggaggggcagaatcatttggaataatagtggcatggaaaatcaggcttgtggctgttccaaagagtaccatgttctcagtaaagaaaataatggagatccatgagctagttaaacttgtgaataaatggcaaaacatagcctataaatatgataaggacttgctgcttatgactcatttcataaccagaaacattacggataaccaagggaagaacaaaacagccatccatacctactttagctccgttttcttgggtggtgtagacagcttagttgacctgatgaacaagagttttccggaactaggtatcaagaaggaagattgtagagaaatgtcctggattgataccataatcttttacagcggagtcgtcaattatgacactgacaacttcaacaaggaaattttattagataggagtgcgggtcaaaatggggccttcaagatcaaactagactacgttaaaaaacccattcctgaaagtgtttttgttcagattctggagaagctgtatgaagaagatattggcgcggggatgtacgtactttatccgtacggcggcataatggatgagattagtgaaagcgccatccctttcccccacagagctggtatcctgtacgagttgtggtatatctgctcctgggagaaacaggaggataacgaaaagcacttaaattggattaggaatatctacaatttcatgacgccctacgtttccaagaaccccaggttggcctatttgaactacagggatcttgatattggaatcaacgaccccaaaaacccaaacaactacacccaggcaaggatttggggagagaagtacttcgggaagaacttcgacaggctagttaaggtgaaaacgctagttgatccaaataattttttcagaaacgaacagagtatccctcccttaccgcgtcataggcac

SEQ ID NO: 1116 - DNA, 1548 bp, Artificial Sequence
  Synthetic
aatccaagagaaaatttcttgaagtgtttttctcagtatatcccgaataatgcgacgaaccttaagttagtatacactcagaacaaccctctatatatgagcgttctaaattctacaatccacaacctaagatttacgtccgacacgactccgaaacccctagttatagtgacaccgtcacatgttagccatatacaggccaccatactatgttccaaaaaagttgggttacaaatacgtacccgtagcgggggacacgacagtgaggggatgagttatattagtcaggtgcctttcgtcatagtggatttaagaaatatgaggtcaattaaaatcgacgttcactcacaaactgcctgggttgaggcgggggccacattgggtgaagtatattactgggtcaatgagaagaacgagaatctttcactagcagccggttattgtcccacagtctgcgccggcggtcactttggcggcggcggatacggtcccttaatgagaaattacgggcttgccgcagacaatatcatagatgctcacttagttaatgttcatggaaaagtgttagaccgtaaaagcatgggggaggatctgttttgggcgcttagagggggaggggcagaatcatttggaataatagtggcatggaaaatcaggcttgtggctgttccaaagagtaccatgttctcagtaaagaaaataatggagatccatgagctagttaaacttgtgaataaatggcaaaacatagcctataaatatgataaggacttgctgcttatgactcatttcataaccagaaacattacggataaccaagggaagaacaaaacagccatccatacctactttagctccgttttcttgggtggtgtagacagcttagttgacctgatgaacaagagttttccggaactaggtatcaagaaggaagattgtagagaactttcctggattgataccataatcttttacagcggagtcgtcaattatgacactgacaacttcaacaaggaaattttattagataggagtgcgggtcaaaatggggccttcaagatcaaactagactacgttaaaaaacccattcctgaaagtgtttttgttcagattctggagaagctgtatgaagaagatattggtgcgggtatgtacgttctttatccgtacggcggcataatggatgagattagtgaaagcgccatccctttcccccacagagctggtatcctgtacgagttgtggtatatctgctcctgggagaaacaggaggataacgaaaagcacttaaattggattaggaatatctacaatttcatgacgccctacgtttccaagaaccccaggttggcctattataactacagggatcttgatattggaatcaacgaccccaaaaacccaaacaactacacccaggcaaggatttggggagagaagtacttcgggaagaacttcgacaggctagttaaggtgaaaacgctagttgatccaaataattttttcagaaacgaacagagtatccctcccttaccgcgtcataggcac

SEQ ID NO: 1117 - DNA, 1548 bp, Artificial Sequence
  Synthetic
aatccaagagaaaatttcttgaagtgtttttctcagtatatcccgaataatgcgacgaaccttaacttagtatacactcagaacaaccctctatatatgagcgttctaaattctacaatccaaaacctaagatttacgtccgacacgactccgaaacccctagttatagtgacaccgtcacatgttagccatatacagggcaccatactatgtgcaaaaaaagttgggttacaaatacgtacccgtagcgggggacacgacagtgaggggatgagttatattagtcaggtgcctttcgtcatagtggatttaagaaatatgaggtcaattaaaatcgacgttcactcacaaactgcctgggttgaggcgggggccacattgggtgaagtatattactgggtcaatgagaagaacgagaatctttcactagcagccggttattgtcccacagtctgcgccggcggtcactttggcggcggcggatacggtcccttaatgagaaattacgggcttgccgcagacaatatcatagatgctcacttagttaatgttaacggaaaagtgttagaccgtaaaagcatgggggaggatctgttttgggcgcttagagggggaggggcagaatcatttggaataatagtggcatggaaaatcaggcttgtggctgttccaaagagtaccatgttctcagtaaagaaaataatggagatccatgagctagttaaacttgtgaataaatggcaaaacatagcctataaatatgataaggacttgctgcttatgactcatttcataaccagaaacattacggataaccaagggaagaacaaaacagccatccatacctactttagctccgttttcttgggtggtgtagacagcttagttgacctgatgaacaagagttttccggaactaggtatcaagaaggaagattgtagagaaatgtcctggattgataccataatcttttacagcggagtcgtcaattatgacactgacaacttcaacaaggaaattttattagataggagtgcgggtcaaaatggggccttcaagatcaaactagactacgttaaaaaacccattcctgaaagtgtttttgttcagattctggagaagctgtatgaagaagatattggcgcggggatgtacgctctttatccgtacggcggcataatggatgagattagtgaaagcgccatccctttcccccacagagctggtatcctgtacgagttgtggtatatctgctcctgggagaaacaggaggataacgaaaagcacttaaattggattaggaatatctacaatttcatgacgccctacgtttccaagaaccccaggttggcctatttgaactacagggatcttgatattggaatcaacgaccccaaaaacccaaacaactacacccaggcaaggatttggggagagaagtacttcgggaagaacttcgacaggctagttaaggtgaaaacgctagttgatccagataattttttcagaaacgaacagagtatccctcccttaccgcgtcataggcac

SEQ ID NO: 1118 - DNA, 1548 bp, Artificial Sequence
  Synthetic
aatccaagagaaaatttcttgaagtgtttttctcagtatatcccgaataatgcgacgaaccttaacttagtatacactcagaacaaccctctatatatgagcgttctaaattctacaatccaaaacctaagatttacgtccgacacgactccgaaacccctagttatagtgacaccgtcacatgttagccatatacagggcaccatactatgtgctaaaaaagttgggttacaaatacgtacccgtagcgggggacacgacagtgaggggatgagttatattagtcaggtgcctttcgtcatagtggatttaagaaatatgaggtcaattaaaatcgacgttcactcacaaactgcctgggttgaggcgggggccacattgggtgaagtatattactgggtcaatgagaagaacgagaatctttcactagcagccggttattgtcccacagtctgcgccggcggtcactttggcggcggcggatacggtcccttaatgagaaattacgggcttgccgcagacaatatcatagatgctcacttagttaatgttaacggaaaagtgttagaccgtaaaagcatgggggaggatctgttttgggcgcttagagggggaggggcagaatcatttggaataatagtggcatggaaaatcaggcttgtggctgttccaaagagtaccatgttctcagtaaagaaaataatggagatccatgagctagttaaacttgtgaataaatggcaaaacatagcctataaatatgataaggacttgctgcttatgactcatttcataaccagaaacattacggataaccaagggaagaacaaaacagccatccatacctactttagctccgttttcttgggtggtgtagacagcttagttgacctgatgaacaagagttttccggaactaggtatcaagaaggaagattgtagagaaatgtcctggattgataccataatcttttacagcggagtcgtcaattatgacactgacaacttcaacaaggaaattttattagataggagtgcgggtcaaaatggggccttcaagatcaaactagactacgttaaaaaacccattcctgaaagtgtttttgttcagattctggagaagctgtatgaagaagatattggcgcggggatgtacgctctttatccgtacggcggcataatggatgagattagtgaaagcgccatccctttcccccacagagctggtatcctgtacgagttgtggtatatctgctcctgggagaaacaggaggataacgaaaagcacttaaattggattaggaatatctacaatttcatgacgccctacgtttccaagaaccccaggttggcctatttgaactacagggatcttgatattggaatcaacgaccccaaaaacccaaacaactacacccaggcaaggatttggggagagaagtacttcgggaagaacttcgacaggctagttaaggtgaaaacgctagttgatccaaataattttttcagaaacgaacagagtatccctcccttaccgcgtcataggcac

SEQ ID NO: 1119 - DNA, 1548 bp, Artificial Sequence
  Synthetic
aatccaagagaaaatttcttgaagtgtttttctcagtatatcccgaataatgcgacgaaccttaacttagtatacactcagaacaaccctctatatatgagcgttctaaattctacaatccacaacctaagatttacgtccgacacgactccgaaacccctagttatagtgacaccgtcacatgttagccatatacaggctaccatactatgttccaaaaaagttgggttacaaatacgtacccgtagcgggggacacgacagtgaggggatgagttatattagtcaggtgcctttcgtcatagtggatttaagaaatatgaggtcaattaaaatcgacgttcactcacaaactgcctgggttgaggcgggggccacattgggtgaagtatattactgggtcaatgagaagaacgagaatctttcactagcagccggttattgtcccacagtctgcgccggcggtcactttggcggcggcggatacggtcccttaatgagaaattacgggcttgccgcagacaatatcatagatgctcacttagttaatgttaacggaaaagtgttagaccgtaaaagcatgggggaggatctgttttgggcgcttagagggggaggggcagaatcatttggaataatagtggcatggaaaatcaggcttgtggctgttccaaagagtaccatgttctcagtaaagaaaataatggagatccatgagctagttaaacttgtgaataaatggcaaaacatagcctataaatatgataaggacttgctgcttatgactcatttcataaccagaaacattacggataaccaagggaagaacaaaacagccatccatacctactttagctccgttttcttgggtggtgtagacagcttagttgacctgatgaacaagagttttccggaactaggtatcaagaaggaagattgtagagaaatgtcctggattgataccataatcttttacagcggagtcgtcaattatgacactgacaacttcaacaaggaaattttattagataggagtgcgggtcaaaatggggccttcaagatcaaactagactacgttaaaaaacccattcctgaaagtgtttttgttcagattctggagaagctgtatgaagaagatattggcgcggggatgtacgtactttatccgtacggcggcataatggatgagattagtgaaagcgccatccctttcccccacagagctggtatcctgtacgagttgtggtatatctgctcctgggagaaacaggaggataacgaaaagcacttaaattggattaggaatatctacaatttcatgacgccctacgtttccaagaaccccaggttggcctatttgaactacagggatcttgatattggaatcaacaatcccaaaaacccaaacaactacacccaggcaaggatttggggagagaagtacttcgggaagaacttcgacaggctagttaaggtgaaaacgctagttgatccagataattttttcagaaacgaacagagtatccctcccttaccgcgtcataggcac

SEQ ID NO: 1120 - DNA, 1548 bp, Artificial Sequence
  Synthetic
aatccaagagaaaatttcttgaagtgtttttctcagtatatcccgaataatgcgacgaaccttaagttagtatacactcagaacaaccctctatatatgagcgttctaaattctacaatccacaacctaagatttacgtccgacacgactccgaaacccctagttatagtgacaccgtcacatgttagccatatacaggccaccatactatgttccaaaaaagttgggttacaaatacgtacccgtagcgggggacacgacagtgaggggatgagttatattagtcaggtgcctttcgtcatagtggatttaagaaatatgaggtcaattaaaatcgacgttcactcacaaactgcctgggttgaggcgggggccacattgggtgaagtatattactgggtcaatgagaagaacgagaatctttcactagcagccggttattgtcccacagtctgcgccggcggtcactttggcggcggcggatacggtcccttaatgagaaattacgggcttgccgcagacaatatcatagatgctcacttagttaatgttcatggaaaattattagaccgtaaaagcatgggggaggatctgttttgggcgcttagagggggaggggcagaatcatttggaataatagtggcatggaaaatcaggcttgtggctgttccaaagagtaccatgttctcagtaaagaaaataatggagatccatgagctagttaaacttgtgaataaatggcaaaacatagcctataaatatgataaggacttgctgcttatgactcatttcataaccagaaacattacggataaccaagggaagaacaaaacagccatccatacctactttagctccgttttcttgggtggtgtagacagcttagttgacctgatgaacaagagttttccggaactaggtatcaagaaggaagattgtagagaactttcctggattgataccataatcttttacagcggagtcgtcaattatgacactgacaacttcaacaaggaaattttattagataggagtgcgggtcaaaatggggccttcaagatcaaactagactacgttaaaaaacccattcctgaaagtgtttttgttcagattctggagaagctgtatgaagaagatattggtgcgggtatgtacgtactttatccgtacggcggcataatggatgagattagtgaaagcgccatccctttcccccacagagctggtatcctgtacgagttgtggtatatctgctcctgggagaaacaggaggataacgaaaagcacttaaattggattaggaatatctacaatttcatgacgccctacgtttccaagaaccccaggttggcctatttgaactacagggatcttgatattggaatcaacgaccccaaaaacccaaacaactacacccaggcaaggatttggggagagaagtacttcgggaagaacttcgacaggctagttaaggtgaaaacgctagttgatccaaataattttttcagaaacgaacagagtatccctcccttaccgcgtcataggcac

SEQ ID NO: 1121 - DNA, 1548 bp, Artificial Sequence
  Synthetic
aatccaagagaaaatttcttgaagtgtttttctcagtatatcccgaataatgcgacgaaccttaacttagtatacactcagaacaaccctctatatatgagcgttctaaattctacaatccacaacctaagatttacgtccgacacgactccgaaacccctagttatagtgacaccgtcacatgttagccatatacagggcaccatactatgttccaaaaaagttgggttacaaatacgtacccgtagcgggggacacgacgctgaggggatgagttatattagtcaggtgcctttcgtcatagtggatttaagaaatatgaggtcaattaaaatcgacgttcactcacaaactgcctgggttgaggcgggggccacattgggtgaagtatattactgggtcaatgagaagaacgagaatctttcactagcagccggttattgtcccacagtctgcgccggcggtcactttggcggcggcggatacggtcccttaatgagaaattacgggcttgccgcagacaatatcatagatgctcacttagttaatgttcatggaaaagtgttagaccgtaaaagcatgggggaggatctgttttgggcgcttagagggggaggggcagaatcatttggaataatagtggcatggaaaatcaggcttgtggctgttccaaagagtaccatgttctcagtaaagaaaataatggagatccatgagctagttaaacttgtgaataaatggcaaaacatagcctataaatatgataaggacttgctgcttatgactcatttcataaccagaaacattacggataaccaagggaagaacaaaacagccatccatacctactttagctccgttttcttgggtggtgtagacagcttagttgacctgatgaacaagagttttccggaactaggtatcaagaaggaagattgtagagaactttcctggattgataccataatcttttacagcggagtcgtcaattatgacactgacaacttcaacaaggaaattttattagataggagtgcgggtcaaaatggggccttcaagatcaaactagactacgttaaaaaacccattcctgaaagtgtttttgttcagattctggagaagctgtatgaagaagatattggtgcgggtatgtacgctctttatccgtacggcggcataatggatgagattagtgaaagcgccatccctttcccccacagagctggtatcctgtacgagttgtggtatatctgctcctgggagaaacaggaggataacgaaaagcacttaaattggattaggaatatctacaatttcatgacgccctacgtttccaagaaccccaggttggcctatttgaactacagggatcttgatattggaatcaacgaccccaaaaacccaaacaactacacccaggcaaggatttggggagagaagtacttcgggaagaacttcgacaggctagttaaggtgaaaacgctagttgatccagataattttttcagaaacgaacagagtatccctcccttaccgcgtcataggcac

SEQ ID NO: 1122 - DNA, 1548 bp, Artificial Sequence
  Synthetic
aatccaagagaaaatttcttgaagtgtttttctcagtatatcccgaataatgcgacgaaccttaacttagtatacactcagaacaaccctctatatatgagcgttctaaattctacaatccacaacctaagatttacgtccgacacgactccgaaacccctagttatagtgacaccgtcacatgttagccatatacaggcaaccatactatgttccaaaaaagttgggttacaaatacgtacccgtagcgggggacacgacagtgaggggatgagttatattagtcaggtgcctttcgtcatagtggatttaagaaatatgaggtcaattaaaatcgacgttcactcacaaactgcctgggttgaggcgggggccacattgggtgaagtatattactgggtcaatgagaagaacgagaatctttcactagcagccggttattgtcccacagtctgcgccggcggtcactttggcggcggcggatacggtcccttaatgagaaattacgggcttgccgcagacaatatcatagatgctcacttagttaatgttaacggaaaagtgttagaccgtaaaagcatgggggaggatctgttttgggcgcttagagggggaggggcagaatcatttggaataatagtggcatggaaaatcaggcttgtggctgttccaaagagtaccatgttctcagtaaagaaaataatggagatccatgagctagttaaacttgtgaataaatggcaaaacatagcctataaatatgataaggacttgctgcttatgactcatttcataaccagaaacattacggataaccaagggaagaacaaaacagccatccatacctactttagctccgttttcttgggtggtgtagacagcttagttgacctgatgaacaagagttttccggaactaggtatcaagaaggaagattgtagagaaatgtcctggattgataccataatcttttacagcggagtcgtcaattatgacactgacaacttcaacaaggaaattttattagataggagtgcgggtcaacctggggccttcaagatcaaactagactacgttaaaaaacccattcctgaaagtgtttttgttcagattctggagaagctgtatgaagaagatattggcgcggggatgtacgtactttatccgtacggcggcataatggatgagattagtgaaagcgccatccctttcccccacagagctggtatcctgtacgagttgtggtatatctgctcctgggagaaacaggaggataacgaaaagcacttaaattggattaggaatatctacaatttcatgacgccctacgtttccaagaaccccaggttggcctatttgaactacagggatcttgatattggaatcaacgaccccaaaaacccaaacaactacacccaggcaaggatttggggagagaagtacttcgggaagaacttcgacaggctagttaaggtgaaaacgctagttgatccaaataattttttcagaaacgaacagagtatccctcccttaccgcgtcataggcac

SEQ ID NO: 1123 - DNA, 1548 bp, Artificial Sequence
  Synthetic
aatccaagagaaaatttcttgaagtgtttttctcagtatatcccgaataatgcgacgaaccttaagttagtatacactcagaacaaccctctatatatgagcgttctaaattctacaatccacaacctaagatttacgtccgacacgactccgaaacccctagttatagtgacaccgtcacatgttagccatatacaggccaccatactatgttccaaaaaagttgggttacaaatacgtacccgtagcgggggacacgacagtgaggggatgagttatattagtcaggtgcctttcgtcatagtggatttaagaaatatgaggtcaattaaaatcgacgttcactcacaaactgcctgggttgaggcgggggccacattgggtgaagtatattactgggtcaatgagaagaacgagaatctttcactagcagccggttattgtcccacagtctgcgccggcggtcactttggcggcggcggatacggtcccttaatgagaaattacgggcttgccgcagacaatatcatagatgctcacttagttaatgttcatggaaaagtgttagaccgtaaaagcatgggggaggatctgttttgggcgcttagagggggaggggcagaatcatttggaataatagtggcatggaaaatcaggcttgtggctgttccaaagagtaccatgttctcagtaaagaaaataatggagatccatgagctagttaaacttgtgaataaatggcaaaacatagcctataaatatgataaggacttgctgcttatgactcatttcataaccagaaacattacggataaccaagggaagaacaaaacagccatccatacctactttagctccgttttcttgggtggtgtagacagcttagttgacctgatgaacaagagttttccggaactaggtatcaagaaggaagattgtagagaactttcctggattgataccataatcttttacagcggagtcgtcaattatgacactgacaacttcaacaaggaaattttattagataggagtgcgggtcaaaatggggccttcaagatcaaactagactacgttaaaaaacccattcctgaaagtgtttttgttcagattctggagaagctgtatgaagaagatattggtgcgggcatgtacgtactttatccgtacggcggcataatggatgagattagtgaaagcgccatccctttcccccacagagctggtatcctgtacgagttgtggtatatctgctcctgggagaaacaggaggataacgaaaagcacttaaattggattaggaatatctacaatttcatgacgccctacgtttccaagaaccccaggttggcctatgtaaactacagggatcttgatattggaatcaacgaccccaaaaacccaaacaactacacccaggcaaggatttggggagagaagtacttcgggaagaacttcgacaggctagttaaggtgaaaacgctagttgatccaaataattttttcagaaacgaacagagtatccctcccttaccgcgtcataggcac

SEQ ID NO: 1124 - DNA, 1548 bp, Artificial Sequence
  Synthetic
aatccaagagaaaatttcttgaagtgtttttctcagtatatcccgaataatgcgacgaaccttaagttagtatacactcagaacaaccctctatatatgagcgttctaaattctacaatccacaacctaagatttacgtccgacacgactccgaaacccctagttatagtgacaccgtcacatgttagccatatacagggcaccatactatgttccaaaaaagttgggttacaaatacgtacccgtagcgggggacacgacagtgaggggatgagttatattagtcaggtgcctttcgtcatagtggatttaagaaatatgaggtcaattaaaatcgacgttcactcacaaactgcctgggttgaggcgggggccacattgggtgaagtatattactgggtcaatgagaagaacgagaatctttcactagcagccggttattgtcccacagtctgcgccggcggtcactttggcggcggcggatacggtcccttaatgagaaagtacgggcttgccgcagacaatatcatagatgctcacttagttaatgttcatggaaaagtgttagaccgtaaaagcatgggggaggatctgttttgggcgcttagagggggaggggcagaatcatttggaataatagtggcatggaaaatcaggcttgtggctgttccaaagagtaccatgttctcagtaaagaaaataatggagatccatgagctagttaaacttgtgaataaatggcaaaacatagcctataaatatgataaggacttgctgcttatgactcatttcataaccagaaacattacggataaccaagggaagaacaaaacagccatccatacctactttagctccgttttcttgggtggtgtagacagcttagttgacctgatgaacaagagttttccggaactaggtatcaagaaggaagattgtagagaactttcctggattgataccataatcttttacagcggagtcgtcaattatgacactgacaacttcaacaaggaaattttattagataggagtgcgggtcaaaatggggccttcaagatcaaactagactacgttaaaaaacccattcctgaaagtgtttttgttcagattctggagaagctgtatgaagaagatattggagcgggtatgtacgctctttatccgtacggcggcataatggatgagattagtgaaagcgccatccctttcccccacagagctggtatcctgtacgagttgtggtatatctgctcctgggagaaacaggaggataacgaaaagcacttaaattggattaggaatatctacaatttcatgacgccctacgtttccaagaaccccaggttggcctatttgaactacagggatcttgatattggaatcaacgaccccaaaaacccaaacaactacacccaggcaaggatttggggagagaagtacttcgggaagaacttcgacaggctagttaaggtgaaaacgctagttgatccaaataattttttcagaaacgaacagagtatccctcccttaccgcgtcataggcac

SEQ ID NO: 1125 - DNA, 1548 bp, Artificial Sequence
  Synthetic
aatccaagagaaaatttcttgaagtgtttttctcagtatatcccgaataatgcgacgaaccttaagttagtatacactcagaacaaccctctatatatgagcgttctaaattctacaatccacaacctaagatttacgtccgacacgactccgaaacccctagttatagtgacaccgtcacatgttagccatatacagggcaccatactatgttccaaaaaagttgggttacaaatacgtacccgtagcgggggacacgacagtgaggggatgagttatattagtcaggtgcctttcgtcatagtggatttaagaaatatgaggtcaattaaaatcgacgttcactcacaaactgcctgggttgaggcgggggccacattgggtgaagtatattactgggtcaatgagaagaacgagaatctttcactagcagccggttattgtcccacagtctgcgccggcggtcactttggcggcggcggatacggtcccttaatgagaaattacgggcttgccgcagacaatatcatagatgctcacttagttaatgttcatggaaaagtgttagaccgtaaaagcatgggggaggatctgttttgggcgcttagagggggaggggcagaatcatttggaataatagtggcatggaaaatcaggcttgtggctgttccaaagagtaccatgttctcagtaaagaaaataatggagatccatgagctagttaaacttgtgaataaatggcaaaacatagcctataaatatgataaggacttgctgcttatgactcatttcataaccagaaacattacggataaccaagggaagaacaaaacagccatccatacctactttagctccgttttcttgggtggtgtagacagcttagttgacctgatgaacaagagttttccggaactaggtatcaagaaggaagattgtagagaactttcctggattgataccataatcttttacagcggagtcgtcaattatgacactgacaacttcaacaaggaaattttattagataggagtgcgggtcaaaatggggcctacaagatcaaactagactacgttaaaaaacccattcctgaaagtgtttttgttcagattctggagaagctgtatgaagaagatattggagcgggtatgtacgctctttatccgtacggcggcataatggatgagattagtgaaagcgccatccctttcccccacagagctggtatcctgtacgagttgtggtatatctgctcctgggagaaacaggaggataacgaaaagcacttaaattggattaggaatatctacaatttcatgacgccctacgtttccaagaaccccaggttggcctatttgaactacagggatcttgatattggaatcaacgaccccaaaaacccaaacaactacacccaggcaaggatttggggagagaagtacttcgggaagaacttcgacaggctagttaaggtgaaaacgctagttgatccaaataattttttcagaaacgaacagagtatccctcccttaccgcgtcataggcac

SEQ ID NO: 1126 - DNA, 1548 bp, Artificial Sequence
  Synthetic
aatccaagagaaaatttcttgaagtgtttttctcagtatatcccgaataatgcgacgaaccttaacttagtatacactcagaacaaccctctatatatgagcgttctaaattctacaatccacaacctaagatttacgtccgacacgactccgaaacccctagttatagtgacaccgtcacatgttagccatatacaggctaccatactatgttccaaaaaagttgggttacaaatacgtacccgtagcgggggacacgacagtgaggggatgagttatattagtcaggtgcctttcgtcatagtggatttaagaaatatgaggtcaattaaaatcgacgttcactcacaaactgcctgggttgaggcgggggccacattgggtgaagtatattactgggtcaatgagaagaacgagaatctttcactagcagccggttattgtcccacagtctgcgccggcggtcactttggcggcggcggatacggtcccttaatgagaaattacgggcttgccgcagacaatatcatagatgctcacttagttaatgttcatggaaaagtgttagaccgtaaaagcatgggggaggatctgttttgggcgcttagagggggaggggcagaatcatttggaataatagtggcatggaaaatcaggcttgtggctgttccaaagagtaccatgttctcagtaaagaaaataatggagatccatgagctagttaaacttgtgaataaatggcaaaacatagcctataaatatgataaggacttgctgcttatgactcatttcataaccagaaacattacggataaccaagggaagaacaaaacagccatccatacctactttagctccgttttcttgggtggtgtagacagcttagttgacctgatgaacaagagttttccggaactaggtatcaagaaggaagattgtagagaactttcctggattgataccataatcttttacagcggagtcgtcaattatgacactgacaacttcaacaaggaaattttattagataggagtgcgggtcaaaatggggccttcaagatcaaactagactacgttaaaaaacccattcctgaaagtgtttttgttcagattctggagaagctgtatgaagaagatattggcgcgggtatgtacgtactttatccgtacggcggcataatggatgagattagtgaaagcgccatccctttcccccacagagctggtatcctgtacgagttgtggtatatctgctcctgggagaaacaggaggataacgaaaagcacttaaattggattaggaatatctacaatttcatgacgccctacgtttccaagaaccccaggttggcctatttgaactacagggatcttgatattggaatcaacgaccccaaaaacccaaacaactacacccaggcaaggatttggggagagaagtacttcgggaagaacttcgacaggctagttaaggtgaaaacgctagttgatccagataattttttcagaaacgaacagagtatccctcccttaccgcgtcataggcac

SEQ ID NO: 1127 - DNA, 1548 bp, Artificial Sequence
  Synthetic
aatccaagagaaaatttcttgaagtgtttttctcagtatatcccgaataatgcgacgaaccttaagttagtatacactcagaacaaccctctatatatgagcgttctaaattctacaatccacaacctaagatttacgtccgacacgactccgaaacccctagttatagtgacaccgtcacatgttagccatatacaggccaccatactatgttccaaaaaagttgggttacaaatacgtacccgtagcgggggacacgacagtgaggggatgagttatattagtcaggtgcctttcgtcatagtggatttaagaaatatgaggtcaattaaaatcgacgttcactcacaaactgcctgggttgaggcgggggccacattgggtgaagtatattactgggtcaatgagaagaacgagaatctttcactagcagccggttattgtcccacagtctgcgccggcggtcactttggcggcggcggatacggtcccttaatgagaaattacgggcttgccgcagacaatatcatagatgctcacttagttaatgttcatggaaaagtgttagaccgtaaaagcatgggggaggatctgttttgggcgcttagagggggaggggcagaatcatttggaataatagtggcatggaaaatcaggcttgtggctgttccaaagagtaccatgttctcagtaaagaaaataatggagatccatgagctagttaaacttgtgaataaatggcaaaacatagcctataaatatgataaggacttgctgcttatgactcatttcataaccagaaacattacggataaccaagggaagaacaaaacagccatccatacctactttagctccgttttcttgggtggtgtagacagcttagttgacctgatgaacaagagttttccggaactaggtatcaagaaggaagattgtagagaactttcctggattgataccataatcttttacagcggagtcgtcaattatgacactgacaacttcaacaaggaaattttattagataggagtgcgggtcaaaatggggccttcaagatcaaactagactacgttaaaaaacccattcctgaaagtgtttttgttcagattctggagaagctgtatgaagaagatattggcgcgggtatgtacgtactttatccgttcggcggcataatggatgagattagtgaaagcgccatccctttcccccacagagctggtatcctgtacgagttgtggtatatctgctcctgggagaaacaggaggataacgaaaagcacttaaattggattaggaatatctacaatttcatgacgccctacgtttccaagaaccccaggttggcctatttgaactacagggatcttgatattggaatcaacgaccccaaaaacccaaacaactacacccaggcaaggatttggggagagaagtacttcgggaagaacttcgacaggctagttaaggtgaaaacgctagttgatccaaataattttttcagaaacgaacagagtatccctcccttaccgcgtcataggcac

SEQ ID NO: 1128 - DNA, 1548 bp, Artificial Sequence
  Synthetic
aatccaagagaaaatttcttgaagtgtttttctcagtatatcccgaataatgcgacgaaccttaagttagtatacactcagaacaaccctctatatatgagcgttctaaattctacaatccacaacctaagatttacgtccgacacgactccgaaacccctagttatagtgacaccgtcacatgttagccatatacaggccaccatactatgttccaaaaaagttgggttacaaatacgtacccgtagcgggggacacgacagtgaggggatgagttatattagtcaggtgcctttcgtcatagtggatttaagaaatatgaggtcaattaaaatcgacgttcactcacaaactgcctgggttgaggcgggggccacattgggtgaagtatattactgggtcaatgagaagaacgagaatctttcactagcagccggttattgtcccacagtctgcgccggcggtcactttggcggcggcggatacggtcccttaatgagaaattacgggcttgccgcagacaatatcatagatgctcacttagttaatgttcatggaaaagtgttagaccgtaaaagcatgggggaggatctgttttgggcgcttagagggggaggggcagaatcatttggaataatagtggcatggaaaatcaggcttgtggctgttccaaagagtaccatgttctcagtaaagaaaataatggagatccatgagctagttaaacttgtgaataaatggcaaaacatagcctataaatatgataaggacttgctgcttatgactcatttcataaccagaaacattacggataaccaagggaagaacaaaacagccatccatacctactttagctccgttttcttgggtggtgtagacgaattagttgacctgatgaacaagagttttccggaactaggtatcaagaaggaagattgtagagaactttcctggattgataccataatcttttacagcggagtcgtcaattatgacactgacaacttcaacaaggaaattttattagataggagtgcgggtcaaaatggggccttcaagatcaaactagactacgttaaaaaacccattcctgaaagtgtttttgttcagattctggagaagctgtatgaagaagatattggtgcgggcatgtacgtactttatccgtacggcggcataatggatgagattagtgaaagcgccatccctttcccccacagagctggtatcctgtacgagttgtggtatatctgctcctgggagaaacaggaggataacgaaaagcacttaaattggattaggaatatctacaatttcatgacgccctacgtttccaagaaccccaggttggcctatttgaactacagggatcttgatattggaatcaacgaccccaaaaacccaaacaactacacccaggcaaggatttggggagagaagtacttcgggaagaacttcgacaggctagttaaggtgaaaacgctagttgatccaaataattttttcagaaacgaacagagtatccctcccttaccgcgtcataggcac

SEQ ID NO: 1129 - DNA, 1548 bp, Artificial Sequence
  Synthetic
aatccaagagaaaatttcttgaagtgtttttctcagtatatcccgaataatgcgacgaaccttaacttagtatacactcagaacaaccctctatatatgagcgttctaaattctacaatccacaacctaagatttacgtccgacacgactccgaaacccctagttatagtgacaccgtcacatgttagccatatacagggcaccatactatgttccaaaaaagttgggttacaaatacgtacccgtagcgggggacacgacgctgaggggatgagttatattagtcaggtgcctttcgtcatagtggatttaagaaatatgaggtcaattaaaatcgacgttcactcacaaactgcctgggttgaggcgggggccacattgggtgaagtatattactgggtcaatgagaagaacgagaatctttcactagcagccggttattgtcccacagtctgcgccggcggtcactttggcggcggcggatacggtcccttaatgagaaattacgggcttgccgcagacaatatcatagatgctcacttagttaatgttaacggaaaagtgttagaccgtaaaagcatgggggaggatctgttttgggcgcttagagggggaggggcagaatcatttggaataatagtggcatggaaaatcaggcttgtggctgttccaaagagtaccatgttctcagtaaagaaaataatggagatccatgagctagttaaacttgtgaataaatggcaaaacatagcctataaatatgataaggacttgctgcttatgactcatttcataaccagaaacattacggataaccaagggaagaacaaaacagccatccatacctactttagctccgttttcttgggtggtgtagacagcttagttgacctgatgaacaagagttttccggaactaggtatcaagaaggaagattgtagagaaatgtcctggattgataccataatcttttacagcggagtcgtcaattatgacactgacaacttcaacaaggaaattttattagataggagtgcgggtcaaaatggggccttcaagatcaaactagactacgttaaaaaacccattcctgaaagtgtttttgttcagattctggagaagctgtatgaagaagatattggcgcggggatgtacgctctttatccgtacggcggcataatggatgagattagtgaaagcgccatccctttcccccacagagctggtatcctgtacgagttgtggtatatctgctcctgggagaaacaggaggataacgaaaagcacttaaattggattaggaatatctacaatttcatgacgccctacgtttccaagaaccccaggttggcctatttgaactacagggatcttgatattggaatcaacgaccccaaaaacccaaacaactacacccaggcaaggatttggggagagaagtacttcgggaagaacttcgacaggctagttaaggtgaaaacgctagttgatccagataattttttcagaaacgaacagagtatccctcccttaccgcgtcataggcac

SEQ ID NO: 1130 - DNA, 1548 bp, Artificial Sequence
  Synthetic
aatccaagagaaaatttcttgaagtgtttttctcagtatatcccgaataatgcgacgaaccttaagttagtatacactcagaacaaccctctatatatgagcgttctaaattctacaatccacaacctaagatttacgtccgacacgactccgaaacccctagttatagtgacaccgtcacatgttagccatatacagggcaccatactatgttccaaaaaagttgggttacaaatacgtacccgtagcgggggacacgacagtgaggggatgagttatattagtcaggtgcctttcgtcatagtggatttaagaaatatgaggtcaattaaaatcgacgttcactcacaaactgcctgggttgaggcgggggccacattgggtgaagtatattactgggtcaatgagaagaacgagaatctttcactagcagccggttattgtcccacagtctgcgccggcggtcactttggcggcggcggatacggtcccttaatgagaaattacgggcttgccgcagacaatatcatagatgctcacttagttaatgttcatggaaaagtgttagaccgtaaaagcatgggggaggatctgttttgggcgcttagagggggaggggcagaatcatttggaataatagtggcatggaaaatcaggcttgtggctgttccaaagagtaccatgttctcagtaaagaaaataatggagatccatgagctagttaaacttgtgaataaatggcaaaacatagcctataaatatgataaggacttgctgcttatgactcatttcataaccagaaacattacggataaccaagggaagaacaaaacagccatccatacctactttagctccgttttcttgggtggtgtagacagcttagttgacctgatgaacaagagttttccggaactaggtatcaagaaggaagattgtagagaaatgtcctggattgataccataatcttttacagcggagtcgtcaattatgacactgacaacttcaacaaggaaattttattagataggagtgcgggtcaaaatggggccttcaagatcaaactagactacgttaaaaaacccattcctgaaagtgtttttgttcagattctggagaagctgtatgaagaagatattggtgcgggaatgtacgctctttatccgtacggcggcataatggatgagattagtgaaagcgccatccctttcccccacagagctggtatcctgtacgagttgtggtatatctgctcctgggagaaacaggaggataacgaaaagcacttaaattggattaggaatatctacaatttcatgacgccctacgtttccaagaaccccaggttggcctatttgaactacagggatcttgatattggaatcaacgaccccaaaaacccaaacaactacacccaggcaaggatttggggagagaagtacttcgggaagaacttcgacaggctagttaaggtgaaaacgctagttgatccagataattttttcagaaacgaacagagtatccctcccttaccgcgtcataggcac

SEQ ID NO: 1131 - DNA, 1548 bp, Artificial Sequence
  Synthetic
aatccaagagaaaatttcttgaagtgtttttctcagtatatcccgaataatgcgacgaaccttaacttagtatacactcagaacaaccctctatatatgagcgttctaaattctacaatccacaacctaagatttacgtccgacacgactccgaaacccctagttatagtgacaccgtcacatgttagccatatacaggccaccatactatgttccaaaaaagttgggttacaaatacgtacccgtagcgggggacacgacagtgaggggatgagttatattagtcaggtgcctttcgtcatagtggatttaagaaatatgaggtcaattaaaatcgacgttcactcacaaactgcctgggttgaggcgggggccacattgggtgaagtatattactgggtcaatgagaagaacgagaatctttcactagcagccggttattgtcccacagtctgcgccggcggtcactttggcggcggcggatacggtcccttaatgagaaattacgggcttgccgcagacaatatcatagatgctcacttagttaatgttaacggaaaagtgttagaccgtaaaagcatgggggaggatctgttttgggcgcttagagggggaggggcagaatcatttggaataatagtggcatggaaaatcaggcttgtggctgttccaaagagtaccatgttctcagtaaagaaaataatggagatccatgagctagttaaacttgtgaataaatggcaaaacatagcctataaatatgataaggacttgctgcttatgatgcatttcataaccagaaacattacggataaccaagggaagaacaaaacagccatccatacctactttagctccgttttcttgggtggtgtagacagcttagttgacctgatgaacaagagttttccggaactaggtatcaagaaggaagattgtagagaaatgtcctggattgataccataatcttttacagcggagtcgtcaattatgacactgacaacttcaacaaggaaattttattagataggagtgcgggtcaaaatggggccttcaagatcaaactagactacgttaaaaaacccattcctgaaagtgtttttgttcagattctggagaagctgtatgaagaagatattggcgcggggatgtacgtgctttatccgtacggcggcataatggatgagattagtgaaagcgccatccctttcccccacagagctggtatcctgtacgagttgtggtatatctgctcctgggagaaacaggaggataacgaaaagcacttaaattggattaggaatatctacaatttcatgacgccctacgtttccaagaaccccaggttggcctatttgaactacagggatcttgatattggaatcaacgaccccaaaaacccaaacaactacacccaggcaaggatttggggagagaagtacttcgggaagaacttcgacaggctagttaaggtgaaaacgctagttgatccaaataattttttcagaaacgaacagagtatccctcccttaccgcgtcataggcac

SEQ ID NO: 1132 - DNA, 1548 bp, Artificial Sequence
  Synthetic
aatccaagagaaaatttcttgaagtgtttttctcagtatatcccgaataatgcgacgaaccttaagttagtatacactcagaacaaccctctatatatgagcgttctaaattctacaatccacaacctaagatttacgtccgacacgactccgaaacccctagttatagtgacaccgtcacatgttagccatatacaggccaccatactatgttccaaaaaagttgggttacaaatacgtacccgtagcgggggacacgacagtgaggggatgagttatattagtcaggtgcctttcgtcatagtggatttaagaaatatgaggtcaattaaaatcgacgttcactcacaaactgcctgggttgaggcgggggccacattgggtgaagtatattactgggtcaatgagaagaacgagaatctttcactagcagccggttattgtcccacagtctgcgccggcggtcactttggcggcggcggatacggtcccttaatgagaaattacgggcttgccgcagacaatatcatagatgctcacttagttaatgttcatggaaaagtgttagaccgtaaaagcatgggggaggatctgttttgggcgcttagagggggaggggcagaatcatttggaataatagtggcatggaaaatcaggcttgtggctgttccaaagagtaccatgttctcagtaaagaaaataatggagatccatgagctagttaaacttgtgaataaatggcaaaacatagcctataaatatgataaggacttgctgcttatgactcatttcataaccagaaacattacggataaccaagggaagaacaaaacagccatccatacctactttagctccgttttcttgggtggtgtagacagcttagttgacctgatgaacaagagttttccggaactaggtatcaagaaggaagattgtagagaactttcctggattgataccataatcttttacagcggagtcgtcaattatgacactgacaacttcaacaaggaaattttattagataggagtgcgggttcgaatggggccttcaagatcaaactagactacgttaaaaaacccattcctgaaagtgtttttgttcagattctggagaagctgtatgaagaagatattggtgcgggtatgtacgtcctttatccgtacggcggcataatggatgagattagtgaaagcgccatccctttcccccacagagctggtatcctgtacgagttgtggtatatctgctcctgggagaaacaggaggataacgaaaagcacttaaattggattaggaatatctacaatttcatgacgccctacgtttccaagaaccccaggttggcctatttgaactacagggatcttgatattggaatcaacgaccccaaaaacccaaacaactacacccaggcaaggatttggggagagaagtacttcgggaagaacttcgacaggctagttaaggtgaaaacgctagttgatccaaataattttttcagaaacgaacagagtatccctcccttaccgcgtcataggcac

SEQ ID NO: 1133 - DNA, 1548 bp, Artificial Sequence
  Synthetic
aatccaagagaaaatttcttgaagtgtttttctcagtatatcccgaataatgcgacgaaccttaagttagtatacactcagaacaaccctctatatatgagcgttctaaattctacaatccacaacctaagatttacgtccgacacgactccgaaacccctagttatagtgacaccgtcacatgttagccatatacagggcaccatactatgttccaaaaaagttgggttacaaatacgtacccgtagcgggggacacgacagtgaggggatgagttatattagtcaggtgcctttcgtcatagtggatttaagaaatatgaggtcaattaaaatcgacgttcactcacaaactgcctgggttgaggcgggggccacattgggtgaagtatattactgggtcaatgagaagaacgagaatctttcactagcagccggttattgtcccacagtctgcgccggcggtcactttggcggcggcggatacggtcccttaatgagaaattacgggcttgccgcagacaatatcatagatgctcacttagttaatgttaacggaaaagtgttagaccgtaaaagcatgggggaggatctgttttgggcgcttagagggggaggggcagaatcatttggaataatagtggcatggaaaatcaggcttgtggctgttccaaagagtaccatgttctcagtaaagaaaataatggagatccatgagctagttaaacttgtgaataaatggcaaaacatagcctataaatatgataaggacttgctgcttatgactcatttcataaccagaaacattacggataaccaagggaagaacaaaacagccatccatacctactttagctccgttttcttgggtggtgtagacagcttagttgacctgatgaacaagagttttccggaactaggtatcaagaaggaagattgtagagaaatgtcctggattgataccataatcttttacagcggagtcgtcaattatgacactgacaacttcaacaaggaaattttattagataggagtgcgggtcaaaatggggccttcaagatcaaactagactacgttaaaaaacccattcctgaaagtgtttttgttcagattctggagaagctgtatgaagaagatattggcgcgggtatgtacgctctttatccgtacggcggcataatggatgagattagtgaaagcgccatccctttcccccacagagctggtatcctgtacgagttgtggtatatctgctcctgggagaaacaggaggataacgaaaagcacttaaattggattaggaatatctacaatttcatgacgccctacgtttccaagaaccccaggttggcctatttgaactacagggatcttgatattggaatcaacgaccccaaaaacccaaacaactacacccaggcaaggatttggggagagaagtacttcgggaagaacttcgacaggctagttaaggtgaaaacgctagttgatccagataattttttcagaaacgaacagagtatccctcccttaccgcgtcataggcac

SEQ ID NO: 1134 - DNA, 1548 bp, Artificial Sequence
  Synthetic
aatccaagagaaaatttcttgaagtgtttttctcagtatatcccgaataatgcgacgaaccttaagttagtatacactcagaacaaccctctatatatgagcgttctaaattctacaatccacaacctaagatttacgtccgacacgactccgaaacccctagttatagtgacaccgtcacatgttagccatatacaggccaccatactatgttccaaaaaagttgggttacaaatacgtacccgtagcgggggacacgacagtgaggggatgagttatattagtcaggtgcctttcgtcatagtggatttaagaaatatgaggtcaattaaaatcgacgttcactcacaaactgcctgggttgaggcgggggccacattgggtgaagtatattactgggtcaatgagaagaacgagaatctttcactagcagccggttattgtcccacagtctgcgccggcggtcactttggcggcggcggatacggtcccttaatgagaaattacgggcttgccgcagacaatatcatagatgctcacttagttaatgttcatggaaaagtgttagaccgtaaaagcatgggggaggatctgttttgggcgcttagagggggaggggcagaatcatttggaataatagtggcatggaaaatcaggcttgtggctgttccaaagagtaccatgttctcagtaaagaaaataatggagatccatgagctagttaaacttgtgcataaatggcaaaacatagcctataaatatgataaggacttgctgcttatgactcatttcataaccagaaacattacggataaccaagggaagaacaaaacagccatccatacctactttagctccgttttcttgggtggtgtagacagcttagttgacctgatgaacaagagttttccggaactaggtatcaagaaggaagattgtagagaactttcctggattgataccataatcttttacagcggagtcgtcaattatgacactgacaacttcaacaaggaaattttattagataggagtgcgggtcaaaatggggccttcaagatcaaactagactacgttaaaaaacccattcctgaaagtgtttttgttcagattctggagaagctgtatgaagaagatattggtgcgggcatgtacgtcctttatccgtacggcggcataatggatgagattagtgaaagcgccatccctttcccccacagagctggtatcctgtacgagttgtggtatatctgctcctgggagaaacaggaggataacgaaaagcacttaaattggattaggaatatctacaatttcatgacgccctacgtttccaagaaccccaggttggcctatttgaactacagggatcttgatattggaatcaacgaccccaaaaacccaaacaactacacccaggcaaggatttggggagagaagtacttcgggaagaacttcgacaggctagttaaggtgaaaacgctagttgatccaaataattttttcagaaacgaacagagtatccctcccttaccgcgtcataggcac

SEQ ID NO: 1135 - DNA, 1548 bp, Artificial Sequence
  Synthetic
aatccaagagaaaatttcttgaagtgtttttctcagtatatcccgaataatgcgacgaaccttaagttagtatacactcagaacaaccctctatatatgagcgttctaaattctacaatccacaacctaagatttacgtccgacacgactccgaaacccctagttatagtgacaccgtcacatgttagccatatacaggcaaccatactatgttccaaaaaagttgggttacaaatacgtacccgtagcgggggacacgacagtgaggggatgagttatattagtcaggtgcctttcgtcatagtggatttaagaaatatgaggtcaattaaaatcgacgttcactcacaaactgcctgggttgaggcgggggccacattgggtgaagtatattactgggtcaatgagaagaacgagaatctttcactagcagccggttattgtcccacagtctgcgccggcggtcactttggcggcggcggatacggtcccttaatgagaaattacgggcttgccgcagacaatatcatagatgctcacttagttaatgttcatggaaaagtgttagaccgtaaaagcatgggggaggatctgttttgggcgcttagagggggaggggcagaatcatttggaataatagtggcatggaaaatcaggcttgtggctgttccaaagagtaccatgttctcagtaaagaaaataatggagatccatgagctagttaaacttgtgaataaatggcaaaacatagcctataaatatgataaggacttgctgcttatgactcatttcataaccagaaacattacggataaccaagggaagaacaaaacagccatccatacctactttagctccgttttcttgggtggtgtagacagcttagttgacctgatgaacaagagttttccggaactaggtatcaagaaggaagattgtagagaactttcctggattgataccataatcttttacagcggagtcgtcaattatgacactgacaacttcaacaaggaaattttattagataggagtgcgggtcaaaatggggccttcaagatcaaactagactacgttaaaaaacccattcctgaaagtgtttttgttcagattctggagaagctgtatgaagaagatattggtgcgggtatgtacgtactttatccgtacggcggcataatggatgagattagtgaaagcgccatccctttcccccacagagctggtatcctgtacgagttgtggtatatctgctcctgggagaaacaggaggataacgaaaagcacttaaattggattaggaatatctacaatttcatgacgccctacgtttccaagaaccccaggttggcctatatgaactacagggatcttgatattggaatcaacgaccccaaaaacccaaacaactacacccaggcaaggatttggggagagaagtacttcgggaagaacttcgacaggctagttaaggtgaaaacgctagttgatccaaataattttttcagaaacgaacagagtatccctcccttaccgcgtcataggcac

SEQ ID NO: 1136 - DNA, 1548 bp, Artificial Sequence
  Synthetic
aatccaagagaaaatttcttgaagtgtttttctcagtatatcccgaataatgcgacgaaccttaacttagtatacactcagaacaaccctctatatatgagcgttctaaattctacaatccacaacctaagatttacgtccgacacgactccgaaacccctagttatagtgacaccgtcacatgttagccatatacaggctaccatactatgttccaaaaaagttgggttacaaatacgtacccgtagcgggggacacgacagtgaggggatgagttatattagtcaggtgcctttcgtcatagtggatttaagaaatatgaggtcaattaaaatcgacgttcactcacaaactgcctgggttgaggcgggggccacattgggtgaagtatattactgggtcaatgagaagaacgagaatctttcactagcagccggttattgtcccacagtctgcgccggcggtcactttggcggcggcggatacggtcccttaatgagaaattacgggcttgccgcagacaatatcatagatgctcacttagttaatgttaacggaaaagtgttagaccgtaaaagcatgggggaggatctgttttgggcgcttagagggggaggggcagaatcatttggaataatagtggcatggaaaatcaggcttgtggctgttccaaagagtaccatgttctcagtaaagaaaataatggagatccatgagctagttaaacttgtgaataaatggcaaaacatagcctataaatatgataaggacttgctgcttatgactcatttcataaccagaaacattacggataaccaagggaagaacaaaacagccatccatacctactttagctccgttttcttgggtggtgtagacagcttagttgacctgatgaacaagagttttccggaactaggtatcaagaaggaagattgtagagaaatgtcctggattgataccataatctattacagcggagtcgtcaattatgacactgacaacttcaacaaggaaattttattagataggagtgcgggtcaaaatggggccttcaagatcaaactagactacgttaaaaaacccattcctgaaagtgtttttgttcagattctggagaagctgtatgaagaagatattggcgcggggatgtacgtactttatccgtacggcggcataatggatgagattagtgaaagcgccatccctttcccccacagagctggtatcctgtacgagttgtggtatatctgctcctgggagaaacaggaggataacgaaaagcacttaaattggattaggaatatctacaatttcatgacgccctacgtttccaagaaccccaggttggcctatttgaactacagggatcttgatattggaatcaacgaccccaaaaacccaaacaactacacccaggcaaggatttggggagagaagtacttcgggaagaacttcgacaggctagttaaggtgaaaacgctagttgatccaaataattttttcagaaacgaacagagtatccctcccttaccgcgtcataggcac

SEQ ID NO: 1137 - DNA, 1548 bp, Artificial Sequence
  Synthetic
aatccaagagaaaatttcttgaagtgtttttctcagtatatcccgaataatgcgacgaaccttaacttagtatacactcagaacaaccctctatatatgagcgttctaaattctacaatccacaacctaagatttacgtccgacacgactccgaaacccctagttatagtgacaccgtcacatgttagccatatacaggcaaccatactatgttccaaaaaagttgggttacaaatacgtacccgtagcgggggacacgacagtgaggggatgagttatattagtcaggtgcctttcgtcatagtggatttaagaaatatgaggtcaattaaaatcgacgttcactcacaaactgcctgggttgaggcgggggccacattgggtgaagtatattactgggtcaatgagaagaacgagaatctttcactagcagccggttattgtcccacagtctgcgccggcggtcactttggcggcggcggatacggtcccttaatgagaaattacgggcttgccgcagacaatatcatagatgctcacttagttaatgttcatggaaaagtgttagaccgtaaaagcatgggggaggatctgttttgggcgcttagagggggaggggcagaatcatttggaataatagtggcatggaaaatcaggcttgtggctgttccaaagagtaccatgttctcagtaaagaaaataatggagatccatgagctagttaaacttgtgaataaatggcaaaacatagcctataaatatgataaggacttgctgcttatgactcatttcataaccagaaacattacggataaccaagggaagaacaaaacagccatccatacctactttagctccgttttcttgggtggtgtagacagcttagttgacctgatgaacaagagttttccggaactaggtatcaagaaggaagattgtagagaactttcctggattgataccataatcttttacagcggagtcgtcaattatgacactgacaacttcaacaaggaaattttattagataggagtgcgggtcaaaatggggccttcaagatcaaactagactacgttaaaaaacccattcctgaaagtgtttttgttcagattctggagaagctgtatgaagaagatattggtgcgggtatgtacgtactttatccgtacggcggcataatggatgagattagtgaaagcgccatccctttcccccacagagctggtatcctgtacgagttgtggtatatctgctcctgggagaaacaggaggataacgaaaagcacttaaattggattaggaatatctacaatttcatgacgccctacgtttccaagaaccccaggttggcctatttgaactacagggatcttgatattggaatcaacgaccccaaaaacccaaacaactacacccaggcaaggatttggggagagaagtacttcgggaagaacttcgacaggctagttaaggtgaaaacgctagttgatccaaataattttttcagaaacgaacagagtatccctcccttaccgcgtcataggcac

SEQ ID NO: 1138 - DNA, 1548 bp, Artificial Sequence
  Synthetic
aatccaagagaaaatttcttgaagtgtttttctcagtatatcccgaataatgcgacgaaccttaacttagtatacactcagaacaaccctctatatatgagcgttctaaattctacaatccacaacctaagatttacgtccgacacgactccgaaacccctagttatagtgacaccgtcacatgttagccatatacaggctaccatactatgttccaaaaaagttgggttacaaatacgtacccgtagcgggggacacgacagtgaggggatgagttatattagtcaggtgcctttcgtcatagtggatttaagaaatatgaggtcaattaaaatcgacgttcactcacaaactgcctgggttgaggcgggggccacattgggtgaagtatattactgggtcaatgagaagaacgagaatctttcactagcagccggttattgtcccacagtctgcgccggcggtcactttggcggcggcggatacggtcccttaatgagaaattacgggcttgccgcagacaatatcatagatgctcacttagttaatgttaacggaaaagtgttagaccgtaaaagcatgggggaggatctgttttgggcgcttagagggggaggggcagaatcatttggaataatagtggcatggaaaatcaggcttgtggctgttccaaagagtaccatgttctcagtaaagaaaataatggagatccatgagctagttaaacttgtgaataaatggcaaaacatagcctataaatatgataaggacttgctgcttatgactcatttcataaccagaaacattacggataaccaagggaagaacaaaacagccatccatacctactttagctccgttttcttgggtggtgtagacagcttagttgacctgatgaacaagagttttccggaactaggtatcaagaaggaagattgtagagaaatgtcctggattgataccataatcttttacagcggagtcgtcaattatgacactgacaacttcaacaaggaaattttattagataggagtgcgggtcaaaatggggccttcaagatcaaactagactacgttaaaaaacccattcctgaaagtgtttttgttcagattctggagaagctgtatgaagaagatattggcgcggggatgtacgtactttatccgtacggcggcataatggatgagattagtgaaagcgccatccctttcccccacagagctggtatcctgtacgagttgtggtatgtgtgctcctgggagaaacaggaggataacgaaaagcacttaaattggattaggaatatctacaatttcatgacgccctacgtttccaagaaccccaggttggcctatttgaactacagggatcttgatattggaatcaacgaccccaaaaacccaaacaactacacccaggcaaggatttggggagagaagtacttcgggaagaacttcgacaggctagttaaggtgaaaacgctagttgatccaaataattttttcagaaacgaacagagtatccctcccttaccgcgtcataggcac

SEQ ID NO: 1139 - DNA, 1548 bp, Artificial Sequence
  Synthetic
aatccaagagaaaatttcttgaagtgtttttctcagtatatcccgaataatgcgacgaaccttaagttagtatacactcagaacaaccctctatatatgagcgttctaaattctacaatccacaacctaagatttacgtccgacacgactccgaaacccctagttatagtgacaccgtcacatgttagccatatacagggcaccatactatgttccaaaaaagttgggttacaaatacgtacccgtagcgggggacacgacagtgaggggatgagttatattagtcaggtgcctttcgtcatagtggatttaagaaatatgaggtcaattaaaatcgacgttcactcacaaactgcctgggttgaggcgggggccacattgggtgaagtatattactgggtcaatgagaagaacgagaatctttcactagcagccggttattgtcccacagtctgcgccggcggtcactttggcggcggcggatacggtcccttaatgagaaattacgggcttgccgcagacaatatcatagatgctcacttagttaatgttcatggaaaagtgttagaccgtaaaagcatgggggaggatctgttttgggcgcttagagggggaggggcagaatcatttggaataatagtggcatggaaaatcaggcttgtggctgttccaaagagtaccatgttctcagtaaagaaaataatggagatccatgagctagttaaacttgtgaataaatggcaaaacatagcctataaatatgataaggacttgctgcttatgactcatttcataaccagaaacattacggataaccaagggaagaacaaaacagccatccatacctactttagctccgttttcttgggtggtgtagacagcttagttgacctgatgaacaagagttttccggaactaggtatcaagaaggaagattgtagagaactttcctggattgataccataatcttttacagcggagtcgtcaattatgacactgacaacttcaacaaggaaattttattagataggagtgcgggtcaaaatggggccttcaagatcaaactagactacgttaaaaaacccattcctgaaagtgtttttgttcagattctggagaagctgtatgaagaagatattggtgcgggaatgtacgctctttatccgtacggcggcataatggatgagattagtgaaagcgccatccctttcccccacagagctggtatcctgtacgagatttggtatatctgctcctgggagaaacaggaggataacgaaaagcacttaaattggattaggaatatctacaatttcatgacgccctacgtttccaagaaccccaggttggcctatttgaactacagggatcttgatattggaatcaacgaccccaaaaacccaaacaactacacccaggcaaggatttggggagagaagtacttcgggaagaacttcgacaggctagttaaggtgaaaacgctagttgatccaaataattttttcagaaacgaacagagtatccctcccttaccgcgtcataggcac

SEQ ID NO: 1140 - DNA, 1551 bp, Artificial Sequence
  Synthetic
aatccccaggagaactttcttaagtgtttcagtaaacatatcccaaataacgtggcgaatccgaaattagtatacacgcaaaatgatagcctatattctagcattctgaatagtaccattcaaaacttgcgctttacttcggacacaactccaaagcctttagtcatagttactccttcaaatgtttcccatattcaggctacaatcctctgctctaaaaaagttgggttgcaaatacgtactagatcaggaggccacgatgccgaaggtatgtcttatatctcccaagtgccattcgttgtcgtcgacttgaggaacatgcattctattaagattgatgtacactcccagaccgcatgggttgaagctggtgccacattaggtgaagtatactattggataaacgagaaaaatgaaaatttatcgtttcctggaggctattgtccaactgttggtgtcggtggtcatttctcaggcgggggctacggagcattgatgcgaaactacggactagcagctgataacattatagacgcccatctcgtgaatgtggatggtaaagttcttgatagaaagagcatgggtgaagatttgttttgggcgatcagaggcggtggaggggaaaactttggtattattgcggcttggaaaataaagctggtccctgttccctcgaaagtcacaatcttttctgtaaagaaaaatatggaaatacatgggttggtcaagttattcaataaatggcaaaacattgcttataagtatgataaagacctcctgctgatgactcattttattacgaaaaatattaccgacaatcacggtaagaataaaactacagtgcacggttacttttcttcaattttccatggtggcgttgactctctagtagatttaatgaacaaaagtttccctgagttagggatcaagaaaacggattgtaaagaactatcttggatcgacacaaccatattctattcgggtgttgttaactttaataccgcaaactttaaaaaggaaattttgttagatcgctctgctggaaagaaaacagcatttagtatcaaacttgactatgtaaagaaaccgatacccgagactgccatggttaagatacttgagaagctatacgaagaggatgtgggagctggcatgtacgttctctacccttacggcggtataatggatgaaatttcagaatccgcaatcccattcccacacagagcaggtattatgtatgaactgtggtatactgcctcatgggagaaacaagaagataacgaaaaacacattaattgggtccgtagcgtctacaatttcactacaccatatgtatccaagaacccgagattggcttacttgaattatagagacttggatctaggaaaaaataatgaagaaagcccgaataattatacacaggcaaggatttggggcgagaagtatttcggcaagaacttcaacagattagtaaaagttaagaccaaagttgaccccaataacttttttagaaatgaacaaagtatccctccactcccaccacatcatcat

SEQ ID NO: 1141 - DNA, 1551 bp, Artificial Sequence
  Synthetic
aatccccaagagaactttcttaagtgtttcagtaaacatatcccaaataacgtgacgaatccgaaattagtatacacgcaaaacgatagcctatattcaagcattctgaatagtaccattcaaaacttgcgctttacttcggacacaactccaaagcctttagtcatagttactccttcaaatgtttcccatattcaggctacaatcctctgctctaaaaaagttgggttgcaaatacgtactagatcaggaggccacgatgccgaaggtatgtcttatatctcccaagtgccattcgttgtcgtcgacttgaggaacatgcattctattaagattgatgtacactcccagaccgcatgggttgaagctggtgccacattaggtgaagtatactattggataaacgagaaaaatgaaaatttatcgtttcctggaggctattgtccaactgttggtgtcggtggtcatttctcaggcgggggctacggagcattgatgcgaaactacggactagcagctgataacattatagacgcccatctcgtgaatgtggatggtaaagttcttgatagaaagagcatgggtgaagatttgttttgggcgatcagaggcggtggaggggaaaactttggtattattgcggcttggaaaataaagctggtccctgttccctcgaaagttacaatcttttctgtaaagaaaaatatggaaatacatgggttggtcaagttattcaataaatggcaaaacattgcttataagtatgataaagacctcgttctgatgactcattttattacgaaaaatattaccgacaatcacggtaagaataaaactacagtgcacggttacttttcttcaattttccatggtggcgttgactctctagtagatttaatgaacaaaagtttccctgagttagggatcaagaaagaagattgtaaagaactttcttggatcgacacaaccatattctattcgggtgttgttaactttaataccgcaaactttaaaaaggaaattttgttagatcgctctgctggaaagaaaacagcatttagtatcaaacttgactatgtaaagaaaccgatacccgagactgccatggttaagatacttgagaagctatacgaagaggatgtgggagctggcatgtacgttctctacccttacggcggtataatggatgaaatttcagaatccgcaatcccattcccacacagagcaggtattatgtatgaactgtggtatactgcctcatgggagaaacaagaagataacgaaaaacacattaattgggtccgtagcgtctacaatttcactacaccatatgtatccaagaacccgagattggcttacttgaattatagagacttggatctaggaaaaaataatgaagagagcccgaataattatacacaggcaaggatttggggcgagaagtatttcggcaagaacttcaacagattagtaaaagttaagaccaaagttgaccccaataacttttttagaaatgaacaaagtatccctccactcccaccacatcatcat

SEQ ID NO: 1142 - DNA, 1551 bp, Artificial Sequence
  Synthetic
aatccccaggagaactttcttaagtgtttcagtaaacatatcccaaataacgtggcgaatccgaaattagtatacacgcaaaacgatagcctatattctagcattctgaatagtaccattcaaaacttgcgctttacatcggacacaactccaaagcctttagtcatagttactccttcaaatgtttcccatattcaggctacaatcctctgctctaaaaaagttgggttgcaaatacgtactagatcaggaggccacgatgccgaaggtatgtcttatatctcccaagtgccattcgttgtcgtcgacttgaggaacatgcattctattaagattgatgtagaatcccagaccgcatgggttgaagctggtgccacattaggtgaagtatactattggataaacgagaaaaatgaaaatttatcgtttcctggaggctattgtccaactgttggtgtcggtggtcatttctcaggcgggggctacggagcattgatgcgaaactacggactagcagctgataacattatagacgcccatctcgtgaatgtggatggtaaagttcttgatagaaagagcatgggtgaagatttgttttgggcgatcagaggcggtggaggggaaaactttggtattattgcggcttggaaaataaagctggtcccagttccctcgaaagtcacaatcttttctgtaaagaaaaatatggaaatacatgggttggtcaagttattcaataaatggcaaaacattgcttataagtatgataaagacctcctactgatgactcattttattacgaaaaatattaccgacaatcacggtaagaataaaactacagtgcacggttacttttcttcaattttccatggtggcgttgactctctagtagatttaatgaacaaaagtttccctgagttagggatcaagaaagaagattgtaaagaactgtcttggatcgacacaaccatattctattcgggtgttgttaactttaataccgcaaactttaaaaaggaaattttgttagatcgctctgctggaaagaaaacagcatttagtatcaaacttgactatgtaaagaaaccgatacccgagactgccatggttaagatacttgagaagctatacgaagaggatgtgggagctggcatgtacgttctctacccttacggcggtataatggaagaaatttcagaatccgcaatcccattcccacacagagcaggtattatgtatgaactgtggtatactgcctcatgggagaaacaagaagataacgaaaaacacattaattgggtccgtagcgtctacaatttcactacaccatatgtatccaagaacccgagattggcttacttgaattatagagacttggatctaggaaaaaataatgaggaaagcccgaataattatacacaggcaaggatttggggcgagaagtatttcggcaagaacttcaacagattagtaaaagttaagaccaaagttgaccccaataacttttttagaaatgaacaaagtatccctccactcccaccacatcatcat

SEQ ID NO: 1143 - DNA, 1551 bp, Artificial Sequence
  Synthetic
aatccccaggagaactttcttaagtgtttcagtaaacatatcccaaataacgtggcgaatccgaaattagtatacacgcaaaacgatcagctatattcaagcattctgaatagtaccattcaaaacttgcgctttacttcggacacaactccaaagcctttagtcatagttactccttcaaatgtttcccatattcaggctacaatcctctgctctaaaaaagttgggttgcaaatacgtactagatcaggaggccacgatgccgaaggtatgtcttatatctcccaagtgccattcgttgtcgtcgacttgaggaacatgcattctattaagattgatgtacactcccagaccgcatgggttgaagctggtgccacattaggtgaagtatactattggataaacgagaaaaatgaaaatttatcgtttcctggaggctattgtccaactgttggtgtcggtggtcatttctcaggcgggggctacggagcattgatgcgaaactacggactagcagctgataacattatagacgcccatctcgtgaatgtggatggtaaagttcttgatagaaagagcatgggtgaagatttgttttgggcgatcagaggcggtggaggggaaaactttggtattattgcggcttggaaaataaagctggtccccgttccctcgaaagtcacaatcttttctgtaaagaaaaatatggaaatacatgggttggtcaagttattcaataaatggcaaaacattgcttataagtatgataaagacctcgttctgatgactcattttattacgaaaaatattaccgacaatcacggtaagaataaaactacagtgcacggttacttttcttcaattttccatggtggcgttgactctctagtagatttaatgaacaaaagtttccctgagttagggatcaagaaagaggattgtaaagaattatcttggatcgacacaaccatattctattcgggtgttgttaactttaataccgcaaactttaaaaaggaaattttgttagatcgctctgctggaaagaaaacagcatttagtatcaaacttgactatgtaaagaaaccgatacccgagactgccatggttaagatacttgagaagctatacgaagaggatgtgggagctggcatgtacgttctctacccttacggcggtataatggaagaaatttcagaatccgcaatcccattcccacacagagcaggtattatgtatgaactgtggtatactgcctcatgggagaaacaagaagataacgaaaaacacattaattgggtccgtagcgtctacaatttcactacaccatatgtatccaaaaacccgagattggcttacttgaattatagagacttggatctaggaaaaaataatgaagaaagcccgaataattatacacaggcaaggatttggggcgagaagtatttcggcaagaacttcaacagattagtaaaagttaagaccaaagttgaccccaataacttttttagaaatgaacaaagtatccctccactcccaccacatcatcat

SEQ ID NO: 1144 - DNA, 1551 bp, Artificial Sequence
  Synthetic
aatccccaggagaactttcttaagtgtttcagtaaacatatcccaaataacgtgaccaatccgaaattagtatacacgcaaaatgatcagctatattctagcattctgaatagtaccattcaaaacttgcgctttacttcggacacaactccaaagcctttagtcatagttactccttcaaatgtttcccatattcaggctacaatcctctgctctaaaaaagttgggttgcaaatacgtactagatcaggaggccacgatgccgaaggtatgtcttatatctcccaagtgccattcgttgtcgtcgacttgaggaacatgcattctattaagattgatgtacactcccagaccgcatgggttgaagctggtgccacattaggtgaagtatactattggataaacgagaaaaatgaaaatttatcgtttcctggaggctattgtccaactgttggtgtcggtggtcatttctcaggcgggggctacggagcattgatgcgaaactacggactagcagctgataacattatagacgcccatctcgtgaatgtggatggtaaagttcttgatagaaagagcatgggtgaagatttgttttgggcgatcagaggcggtggaggggaaaactttggtattattgcggcttggaaaataaagctggtcccggttccctcgaaagtcacaatcttttctgtaaagaaaaatatggaaatacatgggttggtcaagttattcaataaatggcaaaacattgcttataagtatgataaagacctcgttctgatgactcattttattacgaaaaatattaccgacaatcacggtaagaataaaactacagtgcacggttacttttcttcaattttccatggtggcgttgactctctagtagatttaatgaacaaaagtttccctgagttagggatcaagaaaacggattgtaaagaactttcttggatcgacacaaccatattctattcgggtgttgttaactttaataccgcaaactttaaaaaggaaattttgttagatcgctctgctggaaagaaaacagcatttagtatcaaacttgactatgtaaagaaaccgatacccgagactgccatggttaagatacttgagaagctatacgaagaggatgtgggagctggcatgtacgttctctacccttacggcggtataatggaagaaatttcagaatccgcaatcccattcccacacagagcaggtattatgtatgaactgtggtatactgcctcatgggagaaacaagaagataacgaaaaacacattaattgggtccgtagcgtctacaatttcactacaccatatgtatccaagaacccgagattggcttacttgaattatagagacttggatctaggaaaaaataatgaggaaagcccgaataattatacacaggcaaggatttggggcgagaagtatttcggcaagaacttcaacagattagtaaaagttaagaccaaagttgaccccaataacttttttagaaatgaacaaagtatccctccactcccaccacatcatcat

SEQ ID NO: 1145 - DNA, 1551 bp, Artificial Sequence
  Synthetic
aatccccaagagaactttcttaagtgtttcagtaaacatatcccaaataacgtggcgaatccgaaattagtatacacgcaaaacgatagcctatattcgagcattctgaatagtaccattcaaaacttgcgctttacatcggacacaactccaaagcctttagtcatagttactccttcaaatgtttcccatattcaggctacaatcctctgctctaaaaaagttgggttgcaaatacgtactagatcaggaggccacgatgccgaaggtatgtcttatatctcccaagtgccattcgttgtcgtcgacttgaggaacatgcattctattaagattgatgtacactcccagaccgcatgggttgaagctggtgccacattaggtgaagtatactattggataaacgagaaaaatgaaaatttatcgtttcctggaggctattgtccaactgttggtgtcggtggtcatttctcaggcgggggctacggagcattgatgcgaaactacggactagcagctgataacattatagacgcccatctcgtgaatgtggatggtaaagttcttgatagaaagagcatgggtgaagatttgttttgggcgatcagaggcggtggaggggaaaactttggtattattgcggcttggaaaataaagctggtccctgttccctcgaaagtaacaatcttttctgtaaagaaaaatatggaaatacatgggttggtcaagttattcaataaatggcaaaacattgcttataagtatgataaagacctcgttctgatgactcattttattacgaaaaatattaccgacaatcacggtaagaataaaactacagtgcacggttacttttcttcaattttccatggtggcgttgactctctagtagatttaatgaacaaaagtttccctgagttagggatcaagaaaacggattgtaaagaactatcttggatcgacacaaccatattctattcgggtgttgttaactttaataccgcaaactttaaaaaggaaattttgttagatcgctctgctggaaagaaaacagcatttagtatcaaacttgactatgtaaagaaaccgatacccgagactgccatggttaagatacttgagaagctatacgaagaggatgtgggagctggcatgtacgttctctacccttacggcggtataatggatgaaatttcagaatccgcaatcccattcccacacagagcaggtattatgtatgaactgtggtatactgcctcatgggagaaacaagaagataacgaaaaacacattaattgggtccgtagcgtctacaatttcactacaccatatgtatccaagaacccgagattggcttacttgaattatagagacttggatctaggaaaaaataatgaggaaagcccgaataattatacacaggcaaggatttggggcgagaagtatttcggcaagaacttcaacagattagtaaaagttaagaccaaagttgaccccaataacttttttagaaatgaacaaagtatccctccactcccaccacatcatcat

SEQ ID NO: 1146 - DNA, 1551 bp, Artificial Sequence
  Synthetic
aatcccagggagaactttcttaagtgtttcagtaaacatatcccaaataacgtgacaaatccgaaattagtatacacgcaaaacgattccctatattctagcattctgaatagtaccattcaaaacttgcgctttacttcggacacaactccaaagcctttagtcatagttactccttcaaatgtttcccatattcaggctacaatcctctgctctaaaaaagttgggttgcaaatacgtactagatcaggaggccacgatgccgaaggtatgtcttatatctcccaagtgccattcgttgtcgtcgacttgaggaacatgcattctattaagattgatgtacactcccagaccgcatgggttgaagctggtgccacattaggtgaagtatactattggataaacgagaaaaatgaaaatttatcgtttcctggaggctattgtccaactgttggtgtcggtggtcatttctcaggcgggggctacggagcattgatgcgaaactacggactagcagctgataacattatagacgcccatctcgtgaatgtggatggtaaagttcttgatagaaagagcatgggtgaagatttgttttgggcgatcagaggcggtggaggggaaaactttggtattattgcggcttggaaaataaagctggtcgatgttccctcgaaagtaacaatcttttctgtaaagaaaaatatggaaatacatgggttggtcaagttattcaataaatggcaaaacattgcttataagtatgataaagacctcctactgatgactcattttattacgaaaaatattaccgacaatcacggtaagaataaaactacagtgcacggttacttttcttcaattttccatggtggcgttgactctctagtagatttaatgaacaaaagtttccctgagttagggatcaagaaaacggattgtaaagaactgtcttggatcgacacaaccatattctattcgggtgttgttaactttaataccgcaaactttaaaaaggaaattttgttagatcgctctgctggaaagaaaacagcatttagtatcaaacttgactatgtaaagaaaccgatacccgagactgccatggttaagatacttgagaagctatacgaagaggatgtgggagctggcatgtacgttctctacccttacggcggtataatggaagaaatttcagaatccgcaatcccattcccacacagagcaggtattatgtatgaactgtggtatactgcctcatgggagaaacaagaagataacgaaaaacacattaattgggtccgtagcgtctacaatttcactacaccatatgtatccaagaacccgagattggcttacttgaattatagagacttggatctaggaaaaaacaatgaggaaagcccgaataattatacacaggcaaggatttggggcgagaagtatttcggcaagaacttcaacagattagtaaaagttaagaccaaagttgaccccaataacttttttagaaatgaacaaagtatccctccactcccaccacatcatcat

SEQ ID NO: 1147 - DNA, 1551 bp, Artificial Sequence
  Synthetic
aatcccagggagaactttcttaagtgtttcagtaaacatatcccaaataacgtggcgaatccgaaattagtatacacgcaaaacgatagcctatattctagcattctgaatagtaccattcaaaacttgcgctttacatcggacacaactccaaagcctttagtcatagttactccttcaaatgtttcccatattcaggctacaatcctctgctctaaaaaagttgggttgcaaatacgtactagatcaggaggccacgatgccgaaggtatgtcttatatctcccaagtgccattcgttgtcgtcgacttgaggaacatgcattctattaagattgatgtagaatcccagaccgcatgggttgaagctggtgccacattaggtgaagtatactattggataaacgagaaaaatgaaaatttatcgtttcctggaggctattgtccaactgttggtgtcggtggtcatttctcaggcgggggctacggagcattgatgcgaaactacggactagcagctgataacattatagacgcccatctcgtgaatgtggatggtaaagttcttgatagaaagagcatgggtgaagatttgttttgggcgatcagaggcggtggaggggaaaactttggtattattgcggcttggaaaataaagctggtcgacgttccctcgaaagtcacaatcttttctgtaaagaaaaatatggaaatacatgggttggtcaagttattcaataaatggcaaaacattgcttataagtatgataaagacctccttctgatgactcattttattacgaaaaatattaccgacaatcacggtaagaataaaactacagtgcacggttacttttcttcaattttccatggtggcgttgactctctagtagatttaatgaacaaaagtttccctgagttagggatcaagaaaacggattgtaaagaattatcttggatcgacacaaccatattctattcgggtgttgttaactttaataccgcaaactttaaaaaggaaattttgttagatcgctctgctggaaagaaaacagcatttagtatcaaacttgactatgtaaagaaaccgatacccgagactgccatggttaagatacttgagaagctatacgaagaggatgtgggagctggcatgtacgttctctacccttacggcggtataatggaagaaatttcagaatccgcaatcccattcccacacagagcaggtattatgtatgaactgtggtatactgcctcatgggagaaacaagaagataacgaaaaacacattaattgggtccgtagcgtctacaatttcactacaccatatgtatccaagaacccgagattggcttacttgaattatagagacttggatctaggaaaaaataatgaggaaagcccgaataattatacacaggcaaggatttggggcgagaagtatttcggcaagaacttcaacagattagtaaaagttaagaccaaagttgaccccaataacttttttagaaatgaacaaagtatccctccactcccaccacatcatcat

SEQ ID NO: 1148 - DNA, 1551 bp, Artificial Sequence
  Synthetic
aatcccagggagaactttcttaagtgtttcagtaaacatatcccaaataacgtggcgaatccgaaattagtatacacgcaaaatgatagcctatattctagcattctgaatagtaccattcaaaacttgcgctttacatcggacacaactccaaagcctttagtcatagttactccttcaaatgtttcccatattcaggctacaatcctctgctctaaaaaagttgggttgcaaatacgtactagatcaggaggccacgatgccgaaggtatgtcttatatctcccaagtgccattcgttgtcgtcgacttgaggaacatgcattctattaagattgatgtagaatcccagaccgcatgggttgaagctggtgccacattaggtgaagtatactattggataaacgagaaaaatgaaaatttatcgtttcctggaggctattgtccaactgttggtgtcggtggtcatttctcaggcgggggctacggagcattgatgcgaaactacggactagcagctgataacattatagacgcccatctcgtgaatgtggatggtaaagttcttgatagaaagagcatgggtgaagatttgttttgggcgatcagaggcggtggaggggaaaactttggtattattgcggcttggaaaataaagctggtcgacgttccctcgaaagtaacaatcttttctgtaaagaaaaatatggaaatacatgggttggtcaagttattcaataaatggcaaaacattgcttataagtatgataaagacctcgttctgatgactcattttattacgaaaaatattaccgacaatcacggtaagaataaaactacagtgcacggttacttttcttcaattttccatggtggcgttgactctctagtagatttaatgaacaaaagtttccctgagttagggatcaagaaagaagattgtaaagaattgtcttggatcgacacaaccatattctattcgggtgttgttaactttaataccgcaaactttaaaaaggaaattttgttagatcgctctgctggaaagaaaacagcatttagtatcaaacttgactatgtaaagaaaccgatacccgagactgccatggttaagatacttgagaagctatacgaagaggatgtgggagctggcatgtacgttctctacccttacggcggtataatggaagaaatttcagaatccgcaatcccattcccacacagagcaggtattatgtatgaactgtggtatactgcctcatgggagaaacaagaagataacgaaaaacacattaattgggtccgtagcgtctacaatttcactacaccatatgtatccaagaacccgagattggcttacttgaattatagagacttggatctaggaaaaaataatgaggaaagcccgaataattatacacaggcaaggatttggggcgagaagtatttcggcaagaacttcaacagattagtaaaagttaagaccaaagttgaccccaataacttttttagaaatgaacaaagtatccctccactcccaccacatcatcat

SEQ ID NO: 1149 - DNA, 1551 bp, Artificial Sequence
  Synthetic
aatccccaggagaactttcttaagtgtttcagtaaacatatcccaaataacgtggcgaatccgaaattagtatacacgcaaaatgattcactatattctagcattctgaatagtaccattcaaaacttgcgctttacttcggacacaactccaaagcctttagtcatagttactccttcaaatgtttcccatattcaggctacaatcctctgctctaaaaaagttgggttgcaaatacgtactagatcaggaggccacgatgccgaaggtatgtcttatatctcccaagtgccattcgttgtcgtcgacttgaggaacatgcattctattaagattgatgtacactcccagaccgcatgggttgaagctggtgccacattaggtgaagtatactattggataaacgagaaaaatgaaaatttatcgtttcctggaggctattgtccaactgttggtgtcggtggtcatttctcaggcgggggctacggagcattgatgcgaaactacggactagcagctgataacattatagacgcccatctcgtgaatgtggatggtaaagttcttgatagaaagagcatgggtgaagatttgttttgggcgatcagaggcggtggaggggaaaactttggtattattgcggcttggaaaataaagctggtcccagttccctcgaaagtaacaatcttttctgtaaagaaaaatatggaaatacatgggttggtcaagttattcaataaatggcaaaacattgcttataagtatgataaagacctcgttctgatgactcattttattacgaaaaatattaccgacaatcacggtaagaataaaactacagtgcacggttacttttcttcaattttccatggtggcgttgactctctagtagatttaatgaacaaaagtttccctgagttagggatcaagaaaacggattgtaaagaactttcttggatcgacacaaccatattctattcgggtgttgttaactttaataccgcaaactttaaaaaggaaattttgttagatcgctctgctggaaagaaaacagcatttagtatcaaacttgactatgtaaagaaaccgatacccgagactgccatggttaagatacttgagaagctatacgaagaggatgtgggagtaggcatgtacgttctctacccttacggcggtataatggaagaaatttcagaatccgcaatcccattcccacacagagcaggtattatgtatgaactgtggtatactgcctcatgggagaaacaagaagataacgaaaaacacattaattgggtccgtagcgtctacaatttcactacaccatatgtatccaagaacccgagattggcttacttgaattatagagacttggatctaggaaaaaataatgaggagagcccgaataattatacacaggcaaggatttggggcgagaagtatttcggcaagaacttcaacagattagtaaaagttaagaccaaagttgaccccaataacttttttagaaatgaacaaagtatccctccactcccaccacatcatcat

SEQ ID NO: 1150 - DNA, 1551 bp, Artificial Sequence
  Synthetic
aatcccagggagaactttcttaagtgtttcagtaaacatatcccaaataacgtggcgaatccgaaattagtatacacgcaaaatgatcagctatattccagcattctgaatagtaccattcaaaacttgcgctttatatcggacacaactccaaagcctttagtcatagttactccttcacacgtttcccatattcaggctacaatcctctgcgcaaaaaaagttgggttgcaaatacgtactagatcaggaggccacgatgccgaaggtatgtcttatatctcccaagtgccattcgttgtcgtcgacttgaggaacatgcattctattaagattgatgtacactcccagaccgcatgggttcaagctggtgccacattaggtgaagtatactattggataaacgagaaaaatgaaaatttatcgtttcctggaggctattgtccaactgttggtgtcggtggtcatttctcaggcgggggctacggagcattgatgcgaaagtacggactagcagctgataacattatagacgcccatctcgtggatgtggatggtaaagttcttgatagaaagagcatgggtgaagatttgttttgggcgatcagaggcggtggaggggaaaactttggtattattgcggcttggaaaataaagctggtcgacgttccctcgaaagtaacaatcttttctgtaaagaaaaatatggaaatacatgggttggtcaagttattccataaatggcaaaacattgcttataagtatgataaagacctcgttctgatgactcattttattacgaaaaatattaccgacaatcacggtaagaataaaactacagtgcacggttacttttcttcaattttccatggtggcgttgactctctagtagatttaatgaacaaaagtttccctgagttagggatcaagaaaacggattgtaaagaaatgtcttggatcgacacaaccatattctattcgggtgttgttaactttaataccgcaaactttaaaaaggaaattttgttagatcgctctgctggaaagaaaacagcatttagtatcaaacttgactatgtaaagaaaccgatacccgagactgccatggttaagatacttgagaagctatacgaagaggatgtgggagctggcatgtacgttctctacccttacggcggtataatggaagaaatttcagaatccgcaatcccattcccacacagagcaggtattatgtatgaactgtggtatactgcctcatgggagaaacaagaagataacgaaaaacacattaattgggtccgtagcgtctacaatttcactacaccatatgtatccaagaacccgagattggcttacttgaattatagagacttggatctaggaaaaaataatcatgaaagcccgaataattatacacaggcaaggatttggggcgagaagtatttcggcaagaacttcaacagattagtaaaagttaagaccaaagttgaccccaataacttttttagaaatgaacaaagtatccctccactcccaccacatcatcat

SEQ ID NO: 1151 - DNA, 1551 bp, Artificial Sequence
  Synthetic
aatccccaggagaactttcttaagtgtttcagtaaacatatcccaaataacgtggcgaatccgaaattagtatacacgcaaaacgattccctatattcaagcattctgaatagtaccattcaaaacttgcgctttacttcggacacaactccaaagcctttagtcatagttactccttcaaatgtttcccatattcaggctacaatcctctgctctaaaaaagttgggttgcaaatacgtactagatcaggaggccacgatgccgaaggtatgtcttatatctcccaagtgccattcgttgtcgtcgacttgaggaacatgcattctattaagattgatgtagaatcccagaccgcatgggttgaagctggtgccacattaggtgaagtatactattggataaacgagaaaaatgaaaatttatcgtttcctggaggctattgtccaactgttggtgtcggtggtcatttctcaggcgggggctacggagcattgatgcgaaactacggactagcagctgataacattatagacgcccatctcgtgaatgtggatggtaaagttcttgatagaaagagcatgggtgaagatttgttttgggcgatcagaggcggtggaggggaaaactttggtattattgcggcttggaaaataaagctggtcccggttccctcgaaagtaacaatcttttctgtaaagaaaaatatggaaatacatgggttggtcaagttattcaataaatggcaaaacattgcttataagtatgataaagacctcctgctgatgactcattttattacgaaaaatattaccgacaatcacggtaagaataaaactacagtgcacggttacttttcttcaattttccatggtggcgttgactctctagtagatttaatgaacaaaagtttccctgagttagggatcaagaaaacggattgtaaagaactttcttggatcgacacaaccatattctattcgggtgttgttaactttaataccgcaaactttaaaaaggaaattttgttagatcgctctgctggaaagaaaacagcatttagtatcaaacttgactatgtaaagaaaccgatacccgagactgccatggttaagatacttgagaagctatacgaagaggatgtgggagctggcatgtacgttctctacccttacggcggtataatggaagaaatttcagaatccgcaatcccattcccacacagagcaggtattatgtatgaactgtggtatactgcctcatgggagaaacaagaagataacgaaaaacacattaattgggtccgtagcgtctacaatttcactacaccatatgtatccaaaaacccgagattggcttacttgaattatagagacttggatctaggaaaaaataatgaagagagcccgaataattatacacaggcaaggatttggggcgagaagtatttcggcaagaacttcaacagattagtaaaagttaagaccaaagttgaccccaataacttttttagaaatgaacaaagtatccctccactcccaccacatcatcat

SEQ ID NO: 1152 - DNA, 1551 bp, Artificial Sequence
  Synthetic
aatcccagggagaactttcttaagtgtttcagtaaacatatcccaaataacgtggcgaatccgaaattaatatacacgcaaaacgatagcctatattccagcattctgaatagtaccattcaaaacttgcgctttacttcggacacaactccaaagcctttagtcatagttactccttcaaatgtttcccatattcaggctacaatcctctgctctaaaaaagttgggttgcaaatacgtactagatcaggaggccacgatgccgaaggtatgtcttatatctcccaagtgccattcgttgtcgtcgacttgaggaacatgcattctattaagattgatgtacactcccagaccgcatgggttgaagctggtgccacattaggtgaagtatactattggataaacgagaaaaatgaaaatttatcgtttcctggaggctattgtccaactgttggtgtcggtggtcatttctcaggcgggggctacggagcattgatgcgaaactacggactagcagctgataacattatagacgcccatctcgtgaatgtggatggtaaagttcttgatagaaagagcatgggtgaagatttgttttgggcgatcagaggcggtggaggggaaaactttggtattattgcggcttggaaaataaagctggtcgacgttccctcgaaagtaacaatcttttctgtaaagaaaaatatggaaatacatgggttggtcaagttattcaataaatggcaaaacattgcttataagtatgataaagacctcctgctgatgactcattttattacgaaaaatattaccgacaatcacggtaagaataaaactacagtgcacggttacttttcttcaattttccatggtggcgttgactctctagtagatttaatgaacaaaagtttccctgagttagggatcaagaaaacggattgtaaagaattatcttggatcgacacaaccatattctattcgggtgttgttaactttaataccgcaaactttaaaaaggaaattttgttagatcgctctgctggaaagaaaacagcatttagtatcaaacttgactatgtaaagaaaccgatacccgagactgccatggttaagatacttgagaagctatacgaagaggatgtgggagctggcatgtacgttctctacccttacggcggtataatggaagaaatttcagaatccgcaatcccattcccacacagagcaggtattatgtatgaactgtggtatactgcctcatgggagaaacaagaagataacgaaaaacacattaattgggtccgtagcgtctacaatttcactacaccatatgtatccaagaacccgagattggcttacttgaattatagagacttggatctaggaaaaaataatgaagagagcccgaataattatacacaggcaaggatttggggcgagaagtatttcggcaagaacttcaacagattagtaaaagttaagaccaaagttgaccccaataacttttttagaaatgaacaaagtatccctccactcccaccacatcatcat

SEQ ID NO: 1153 - DNA, 1551 bp, Artificial Sequence
  Synthetic
aatccccaagagaactttcttaagtgtttcagtaaacatatcccaaataacgtggcgaatccgaaattagtatacacgcaaaacgatcagctatattctagcattctgaatagtaccattcaaaacttgcgctttacttcggacacaactccaaagcctttagtcatagttactccttcaaatgtttcccatattcaggctacaatcctctgctctaaaaaagttgggttgcaaatacgtactagatcaggaggccacgatgccgaaggtatgtcttatatctcccaagtgccattcgttgtcgtcgacttgaggaacatgcattctattaagattgatgtagaatcccagaccgcatgggttgaagctggtgccacattaggtgaagtatactattggataaacgagaaaaatgaaaatttatcgtttcctggaggctattgtccaactgttggtgtcggtggtcatttctcaggcgggggctacggagcattgatgcgaaactacggactagcagctgataacattatagacgcccatctcgtgaatgtggatggtaaagttcttgatagaaagagcatgggtgaagatttgttttgggcgatcagaggcggtggaggggaaaactttggtattattgcggcttggaaaataaagctggtccccgttccctcgaaagtaacaatcttttctgtaaagaaaaatatggaaatacatgggttggtcaagttattcaataaatggcaaaacattgcttataagtatgataaagacctcgttctgatgactcattttattacgaaaaatattaccgacaatcacggtaagaataaaactacagtgcacggttacttttcttcaattttccatggtggcgttgactctctagtagatttaatgaacaaaagtttccctgagttagggatcaagaaaacggattgtaaagaactttcttggatcgacacaaccatattctattcgggtgttgttaactttaataccgcaaactttaaaaaggaaattttgttagatcgctctgctggaaagaaaacagcatttagtatcaaacttgactatgtaaagaaaccgatacccgagactgccatggttaagatacttgagaagctatacgaagaggatgtgggagctggcatgtacgttctctacccttacggcggtataatggaagaaatttcagaatccgcaatcccattcccacacagagcaggtattatgtatgaactgtggtatactgcctcatgggagaaacaagaagataacgaaaaacacattaattgggtccgtagcgtctacaatttcactacaccatatgtatccaagaacccgagattggcttacttgaattatagagacttggatctaggaaaaaataatgaagagagcccgaataattatacacaggcaaggatttggggcgagaagtatttcggcaagaacttcaacagattagtaaaagttaagaccaaagttgaccccaataacttttttagaaatgaacaaagtatccctccactcccaccacatcatcat

SEQ ID NO: 1154 - DNA, 1551 bp, Artificial Sequence
  Synthetic
aatccccaggagaactttcttaagtgtttcagtaaacatatcccaaataacgtggcgaatccgaaattagtatacacgcaaaacgattcactatattctagcattctgaatagtaccattcaaaacttgcgctttacttcggacacaactccaaagcctttagtcatagttactccttcaaatgtttcccatattcaggctacaatcctctgctctaaaaaagttgggttgcaaatacgtactagatcaggaggccacgatgccgaaggtatgtcttatatctcccaagtgccattcgttgtcgtcgacttgaggaacatgcattctattaagattgatgtagaatcccagaccgcatgggttgaagctggtgccacattaggtgaagtatactattggataaacgagaaaaatgaaaatttatcgtttcctggaggctattgtccaactgttggtgtcggtggtcatttctcaggcgggggctacggagcattgatgcgaaactacggactagcagctgataacattatagacgcccatctcgtgaatgtggatggtaaagttcttgatagaaagagcatgggtgaagatttgttttgggcgatcagaggcggtggaggggaaaactttggtattattgcggcttggaaaataaagctggtccctgttccctcgaaagtaacaatcttttctgtaaagaaaaatatggaaatacatgggttggtcaagttattcaataaatggcaaaacattgcttataagtatgataaagacctcgttctgatgactcattttattacgaaaaatattaccgacaatcacggtaagaataaaactacagtgcacggttacttttcttcaattttccatggtggcgttgactctctagtagatttaatgaacaaaagtttccctgagttagggatcaagaaaacggattgtaaagaactatcttggatcgacacaaccatattctattcgggtgttgttaactttaataccgcaaactttaaaaaggaaattttgttagatcgctctgctggaaagaaaacagcatttagtatcaaacttgactatgtaaagaaaccgatacccgagactgccatggttaagatacttgagaagctatacgaagaggatgtgggagctggcatgtacgttctctacccttacggcggtataatggatgaaatttcagaatccgcaatcccattcccacacagagcaggtattatgtatgaactgtggtatactgcctcatgggagaaacaagaagataacgaaaaacacattaattgggtccgtagcgtctacaatttcactacaccatatgtatccaagaacccgagattggcttacttgaattatagagacttggatctaggaaaaaataatgaagagagcccgaataattatacacaggcaaggatttggggcgagaagtatttcggcaagaacttcaacagattagtaaaagttaagaccaaagttgaccccaataacttttttagaaatgaacaaagtatccctccactcccaccacatcatcat

SEQ ID NO: 1155 - DNA, 1551 bp, Artificial Sequence
  Synthetic
aatccccaagagaactttcttaagtgtttcagtaaacatatcccaaataacgtggcgaatgctaaattagtatacacgcaaaacgatagcctatattcaagcattctgaatagtaccattcaaaacttgcgctttacatcggacacaactccaaagcctttagtcatagttactccttcaaatgtttcccatattcaggctacaatcctctgctctaaaaaagttgggttgcaaatacgtactagatcaggaggccacgatgccgaaggtatgtcttatatctcccaagtgccattcgttgtcgtcgacttgaggaacatgcattctattaagattgatgtacactcccagaccgcatgggttgaagctggtgccacattaggtgaagtatactattggataaacgagaaaaatgaaaatttatcgtttcctggaggctattgtccaactgttggtgtcggtggtcatttctcaggcgggggctacggagcattgatgcgaaactacggactagcagctgataacattatagacgcccatctcgtgaatgtggatggtaaagttcttgatagaaagagcatgggtgaagatttgttttgggcgatcagaggcggtggaggggaaaactttggtattattgcggcttggaaaataaagctggtcccggttccctcgaaagtcacaatcttttctgtaaagaaaaatatggaaatacatgggttggtcaagttattcaataaatggcaaaacattgcttataagtatgataaagacctccttctgatgactcattttattacgaaaaatattaccgacaatcacggtaagaataaaactacagtgcacggttacttttcttcaattttccatggtggcgttgactctctagtagatttaatgaacaaaagtttccctgagttagggatcaagaaagaagattgtaaagaactatcttggatcgacacaaccatattctattcgggtgttgttaactttaataccgcaaactttaaaaaggaaattttgttagatcgctctgctggaaagaaaacagcatttagtatcaaacttgactatgtaaagaaaccgatacccgagactgccatggttaagatacttgagaagctatacgaagaggatgtgggagctggcatgtacgttctctacccttacggcggtataatggatgaaatttcagaatccgcaatcccattcccacacagagcaggtattatgtatgaactgtggtatactgcctcatgggagaaacaagaagataacgaaaaacacattaattgggtccgtagcgtctacaatttcactacaccatatgtatccaagaacccgagattggcttacttgaattatagagacttggatctaggaaaaaataatgaggagagcccgaataattatacacaggcaaggatttggggcgagaagtatttcggcaagaacttcaacagattagtaaaagttaagaccaaagttgaccccaataacttttttagaaatgaacaaagtatccctccactcccaccacatcatcat

SEQ ID NO: 1156 - DNA, 1551 bp, Artificial Sequence
  Synthetic
aatccccaagagaactttcttaagtgtttcagtaaacatatcccaaataacgtggcgaatccgaaattaatatacacgcaaaacgatcagctatattcgagcattctgaatagtaccattcaaaacttgcgctttacatcggacacaactccaaagcctttagtcatagttactccttcaaatgtatcccatattcaggctacaatcctctgctctaaaaaagttgggttgcaaatacgtactagatcaggaggccacgatgccgaaggtatgtcttatatctcccaagtgccattcgttgtcgtcgacttgaggaacatgcattctattaagattgatgtacactcccagaccgcatgggttgaagctggtgccacattaggtgaagtatactattggataaacgagaaaaatgaaaatttatcgtttcctggaggctattgtccaactgttggtgtcggtggtcatttctcaggcgggggctacggagcattgatgcgaaactacggactagcagctgataacattatagacgcccatctcgtgaatgtggatggtaaagttcttgatagaaagagcatgggtgaagatttgttttgggcgatcagaggcggtggaggggaaaactttggtattattgcggcttggaaaataaagctggtccccgttccctcgaaagtaacaatcttttctgtaaagaaaaatatggaaatacatgggttggtcaagttattcaataaatggcaaaacattgcttataagtatgataaagacctcgttctgatgactcattttattacgaaaaatattaccgacaatcacggtaagaataaaactacagtgcacggttacttttcttcaattttccatggtggcgttgactctctagtagatttaatgaacaaaagtttccctgagttagggatcaagaaaacggattgtaaagaattatcttggatcgacacaaccatattctattcgggtgttgttaactttaataccgcaaactttaaaaaggaaattttgttagatcgctctgctggaaagaaaacagcatttagtatcaaacttgactatgtaaagaaaccgatacccgagactgccatggttaagatacttgagaagctatacgaagaggatgtgggagctggcatgtacgttctctacccttacggcggtataatggaagaaatttcagaatccgcaatcccattcccacacagagcaggtattatgtatgaactgtggtatactgcctcatgggagaaacaagaagataacgaaaaacacattaattgggtccgtagcgtctacaatttcactacaccatatgtatccaagaacccgagattggcttacttgaattatagagacttggatctaggaaaaaataatgaagagagcccgaataattatacacaggcaaggatttggggcgagaagtatttcggcaagaacttcaacagattagtaaaagttaagaccaaagttgaccccaataacttttttagaaatgaacaaagtatccctccactcccaccacatcatcat

SEQ ID NO: 1157 - DNA, 1551 bp, Artificial Sequence
  Synthetic
aatcccagggagaactttcttaagtgtttcagtaaacatatcccaaataacgtgactaatccgaaattagtatacacgcaaaacgattctctatattccagcattctgaatagtaccattcaaaacttgcgctttacatcggacacaactccaaagcctttagtcatagttactccttcaaatgtttcccatattcaggctacaatcctctgctctaaaaaagttgggttgcaaatacgtactagatcaggaggccacgatgccgaaggtatgtcttatatctcccaagtgccattcgttgtcgtcgacttgaggaacatgcattctattaagattgatgtagaatcccagaccgcatgggttgaagctggtgccacattaggtgaagtatactattggataaacgagaaaaatgaaaatttatcgtttcctggaggctattgtccaactgttggtgtcggtggtcatttctcaggcgggggctacggagcattgatgcgaaactacggactagcagctgataacattatagacgcccatctcgtgaatgtggatggtaaagttcttgatagaaagagcatgggtgaagatttgttttgggcgatcagaggcggtggaggggaaaactttggtattattgcggcttggaaaataaagctggtcgatgttccctcgaaagtaacaatcttttctgtaaagaaaaatatggaaatacatgggttggtcaagttattcaataaatggcaaaacattgcttataagtatgataaagacctcttactgatgactcattttattacgaaaaatattaccgacaatcacggtaagaataaaactacagtgcacggttacttttcttcaattttccatggtggcgttgactctctagtagatttaatgaacaaaagtttccctgagttagggatcaagaaaacggattgtaaagaactttcttggatcgacacaaccatattctattcgggtgttgttaactttaataccgcaaactttaaaaaggaaattttgttagatcgctctgctggaaagaaaacagcatttagtatcaaacttgactatgtaaagaaaccgatacccgagactgccatggttaagatacttgagaagctatacgaagaggatgtgggagctggcatgtacgttctctacccttacggcggtataatggaagaaatttcagaatccgcaatcccattcccacacagagcaggtattatgtatgaactgtggtatactgcctcatgggagaaacaagaagataacgaaaaacacattaattgggtccgtagcgtctacaatttcactacaccatatgtatccaagaacccgagattggcttacttgaattatagagacttggatctaggaaaaaataatgaagaaagcccgaataattatacacaggcaaggatttggggcgagaagtatttcggcaagaacttcaacagattagtaaaagttaagaccaaagttgaccccaataacttttttagaaatgaacaaagtatccctccactcccaccacatcatcat

SEQ ID NO: 1158 - DNA, 1551 bp, Artificial Sequence
  Synthetic
aatccccaagagaactttcttaagtgtttcagtaaacatatcccaaataacgtggcgaatccgaaattaatttacacgcaaaatgattcactatattcgagcattctgaatagtaccattcaaaacttgcgctttacttcggacacaactccaaagcctttagtcatagttactccttcaaatgtatcccatattcaggctacaatcctctgctctaaaaaagttgggttgcaaatacgtactagatcaggaggccacgatgccgaaggtatgtcttatatctcccaagtgccattcgttgtcgtcgacttgaggaacatgcattctattaagattgatgtagaatcccagaccgcatgggttgaagctggtgccacattaggtgaagtatactattggataaacgagaaaaatgaaaatttatcgtttcctggaggctattgtccaactgttggtgtcggtggtcatttctcaggcgggggctacggagcattgatgcgaaactacggactagcagctgataacattatagacgcccatctcgtgaatgtggatggtaaagttcttgatagaaagagcatgggtgaagatttgttttgggcgatcagaggcggtggaggggaaaactttggtattattgcggcttggaaaataaagctggtccctgttccctcgaaagttacaatcttttctgtaaagaaaaatatggaaatacatgggttggtcaagttattcaataaatggcaaaacattgcttataagtatgataaagacctcctactgatgactcattttattacgaaaaatattaccgacaatcacggtaagaataaaactacagtgcacggttacttttcttcaattttccatggtggcgttgactctctagtagatttaatgaacaaaagtttccctgagttagggatcaagaaagaagattgtaaagaattgtcttggatcgacacaaccatattctattcgggtgttgttaactttaataccgcaaactttaaaaaggaaattttgttagatcgctctgctggaaagaaaacagcatttagtatcaaacttgactatgtaaagaaaccgatacccgagactgccatggttaagatacttgagaagctatacgaagaggatgtgggagctggcatgtacgttctctacccttacggcggtataatggatgaaatttcagaatccgcaatcccattcccacacagagcaggtattatgtatgaactgtggtatactgcctcatgggagaaacaagaagataacgaaaaacacattaattgggtccgtagcgtctacaatttcactacaccatatgtatccaagaacccgagattggcttacttgaattatagagacttggatctaggaaaaaataacgaagagagcccgaataattatacacaggcaaggatttggggcgagaagtatttcggcaagaacttcaacagattagtaaaagttaagaccaaagttgaccccaataacttttttagaaatgaacaaagtatccctccactcccaccacatcatcat

SEQ ID NO: 1159 - DNA, 1551 bp, Artificial Sequence
  Synthetic
aatccccaggagaactttcttaagtgtttcagtaaacatatcccaaataacgtggcgaatccgaaattagtatacacgcaaaacgattccctatattcgagcattctgaatagtaccattcaaaacttgcgctttacatcggacacaactccaaagcctttagtcatagttactccttcaaatgtttcccatattcaggctacaatcctctgctctaaaaaagttgggttgcaaatacgtactagatcaggaggccacgatgccgaaggtatgtcttatatctcccaagtgccattcgttgtcgtcgacttgaggaacatgcattctattaagattgatgtacactcccagaccgcatgggttgaagctggtgccacattaggtgaagtatactattggataaacgagaaaaatgaaaatttatcgtttcctggaggctattgtccaactgttggtgtcggtggtcatttctcaggcgggggctacggagcattgatgcgaaactacggactagcagctgataacattatagacgcccatctcgtgaatgtggatggtaaagttcttgatagaaagagcatgggtgaagatttgttttgggcgatcagaggcggtggaggggaaaactttggtattattgcggcttggaaaataaagctggtccctgttccctcgaaagtaacaatcttttctgtaaagaaaaatatggaaatacatgggttggtcaagttattcaataaatggcaaaacattgcttataagtatgataaagacctcgttctgatgactcattttattacgaaaaatattaccgacaatcacggtaagaataaaactacagtgcacggttacttttcttcaattttccatggtggcgttgactctctagtagatttaatgaacaaaagtttccctgagttagggatcaagaaaacggattgtaaagaactttcttggatcgacacaaccatattctattcgggtgttgttaactttaataccgcaaactttaaaaaggaaattttgttagatcgctctgctggaaagaaaacagcatttagtatcaaacttgactatgtaaagaaaccgatacccgagactgccatggttaagatacttgagaagctatacgaagaggatgtgggagctggcatgtacgttctctacccttacggcggtataatggaagaaatttcagaatccgcaatcccattcccacacagagcaggtattatgtatgaactgtggtatactgcctcatgggagaaacaagaagataacgaaaaacacattaattgggtccgtagcgtctacaatttcactacaccatatgtatccaagaacccgagattggcttacttgaattatagagacttggatctaggaaaaaataatgaagagagcccgaataattatacacaggcaaggatttggggcgagaagtatttcggcaagaacttcaacagattagtaaaagttaagaccaaagttgaccccaataacttttttagaaatgaacaaagtatccctccactcccaccacatcatcat

SEQ ID NO: 1160 - DNA, 1551 bp, Artificial Sequence
  Synthetic
aatcccagggagaactttcttaagtgtttcagtaaacatatcccaaataacgtgacgaatccgaaattagtatacacgcaaaacgattccctatattcaagcattctgaatagtaccattcaaaacttgcgctttacatcggacacaactccaaagcctttagtcatagttactccttcaaatgtttcccatattcaggctacaatcctctgctctaaaaaagttgggttgcaaatacgtactagatcaggaggccacgatgccgaaggtatgtcttatatctcccaagtgccattcgttgtcgtcgacttgaggaacatgcattctattaagattgatgtagaatcccagaccgcatgggttgaagctggtgccacattaggtgaagtatactattggataaacgagaaaaatgaaaatttatcgtttcctggaggctattgtccaactgttggtgtcggtggtcatttctcaggcgggggctacggagcattgatgcgaaactacggactagcagctgataacattatagacgcccatctcgtgaatgtggatggtaaagttcttgatagaaagagcatgggtgaagatttgttttgggcgatcagaggcggtggaggggaaaactttggtattattgcggcttggaaaataaagctggtcgacgttccctcgaaagtaacaatcttttctgtaaagaaaaatatggaaatacatgggttggtcaagttattcaataaatggcaaaacattgcttataagtatgataaagacctcgttctgatgactcattttattacgaaaaatattaccgacaatcacggtaagaataaaactacagtgcacggttacttttcttcaattttccatggtggcgttgactctctagtagatttaatgaacaaaagtttccctgagttagggatcaagaaagaagattgtaaagaattgtcttggatcgacacaaccatattctattcgggtgttgttaactttaataccgcaaactttaaaaaggaaattttgttagatcgctctgctggaaagaaaacagcatttagtatcaaacttgactatgtaaagaaaccgatacccgagactgccatggttaagatacttgagaagctatacgaagaggatgtgggagctggcatgtacgttctctacccttacggcggtataatggaagaaatttcagaatccgcaatcccattcccacacagagcaggtattatgtatgaactgtggtatactgcctcatgggagaaacaagaagataacgaaaaacacattaattgggtccgtagcgtctacaatttcactacaccatatgtatccaaaaacccgagattggcttacttgaattatagagacttggatctaggaaaaaataacgaggaaagcccgaataattatacacaggcaaggatttggggcgagaagtatttcggcaagaacttcaacagattagtaaaagttaagaccaaagttgaccccaataacttttttagaaatgaacaaagtatccctccactcccaccacatcatcat

SEQ ID NO: 1161 - DNA, 1551 bp, Artificial Sequence
  Synthetic
aatcccagggagaactttcttaagtgtttcagtaaacatatcccaaataacgtggcgaatccgaaattagtatacacgcaaaacgattcactatattcgagcattctgaatagtaccattcaaaacttgcgctttatatcggacacaactccaaagcctttagtcatagttactccttcaaatgtttcccatattcaggctacaatcctctgctctaaaaaagttgggttgcaaatacgtactagatcaggaggccacgatgccgaaggtatgtcttatatctcccaagtgccattcgttgtcgtcgacttgaggaacatgcattctattaagattgatgtacactcccagaccgcatgggttgaagctggtgccacattaggtgaagtatactattggataaacgagaaaaatgaaaatttatcgtttcctggaggctattgtccaactgttggtgtcggtggtcatttctcaggcgggggctacggagcattgatgcgaaactacggactagcagctgataacattatagacgcccatctcgtgaatgtggatggtaaagttcttgatagaaagagcatgggtgaagatttgttttgggcgatcagaggcggtggaggggaaaactttggtattattgcggcttggaaaataaagctggtcgatgttccctcgaaagtaacaatcttttctgtaaagaaaaatatggaaatacatgggttggtcaagttattcaataaatggcaaaacattgcttataagtatgataaagacctcctcctgatgactcattttattacgaaaaatattaccgacaatcacggtaagaataaaactacagtgcacggttacttttcttcaattttccatggtggcgttgactctctagtagatttaatgaacaaaagtttccctgagttagggatcaagaaaacggattgtaaagaactatcttggatcgacacaaccatattctattcgggtgttgttaactttaataccgcaaactttaaaaaggaaattttgttagatcgctctgctggaaagaaaacagcatttagtatcaaacttgactatgtaaagaaaccgatacccgagactgccatggttaagatacttgagaagctatacgaagaggatgtgggagctggcatgtacgttctctacccttacggcggtataatggaagaaatttcagaatccgcaatcccattcccacacagagcaggtattatgtatgaactgtggtatactgcctcatgggagaaacaagaagataacgaaaaacacattaattgggtccgtagcgtctacaatttcactacaccatatgtatccaaaaacccgagattggcttacttgaattatagagacttggatctaggaaaaaataatcatgaaagcccgaataattatacacaggcaaggatttggggcgagaagtatttcggcaagaacttcaacagattagtaaaagttaagaccaaagttgaccccaataacttttttagaaatgaacaaagtatccctccactcccaccacatcatcat

SEQ ID NO: 1162 - DNA, 1551 bp, Artificial Sequence
  Synthetic
aatcccagggagaactttcttaagtgtttcagtaaacatatcccaaataacgtgacaaatccgaaattagtatacacgcaaaacgattctctatattcgagcattctgaatagtaccattcaaaacttgcgctttacttcggacacaactccaaagcctttagtcatagttactccttcaaatgtttcccatattcaggctacaatcctctgctctaaaaaagttgggttgcaaatacgtactagatcaggaggccacgatgccgaaggtatgtcttatatctcccaagtgccattcgttgtcgtcgacttgaggaacatgcattctattaagattgatgtagaatcccagaccgcatgggttgaagctggtgccacattaggtgaagtatactattggataaacgagaaaaatgaaaatttatcgtttcctggaggctattgtccaactgttggtgtcggtggtcatttctcaggcgggggctacggagcattgatgcgaaactacggactagcagctgataacattatagacgcccatctcgtgaatgtggatggtaaagttcttgatagaaagagcatgggtgaagatttgttttgggcgatcagaggcggtggaggggaaaactttggtattattgcggcttggaaaataaagctggtcgatgttccctcgaaagtaacaatcttttctgtaaagaaaaatatggaaatacatgggttggtcaagttattcaataaatggcaaaacattgcttataagtatgataaagacctcgttctgatgactcattttattacgaaaaatattaccgacaatcacggtaagaataaaactacagtgcacggttacttttcttcaattttccatggtggcgttgactctctagtagatttaatgaacaaaagtttccctgagttagggatcaagaaaacggattgtaaagaactatcttggatcgacacaaccatattctattcgggtgttgttaactttaataccgcaaactttaaaaaggaaattttgttagatcgctctgctggaaagaaaacagcatttagtatcaaacttgactatgtaaagaaaccgatacccgagactgccatggttaagatacttgagaagctatacgaagaggatgtgggagctggcatgtacgttctctacccttacggcggtataatggaagaaatttcagaatccgcaatcccattcccacacagagcaggtattatgtatgaactgtggtatactgcctcatgggagaaacaagaagataacgaaaaacacattaattgggtccgtagcgtctacaatttcactacaccatatgtatccaaaaacccgagattggcttacttgaattatagagacttggatctaggaaaaaataatgaagagagcccgaataattatacacaggcaaggatttggggcgagaagtatttcggcaagaacttcaacagattagtaaaagttaagaccaaagttgaccccaataacttttttagaaatgaacaaagtatccctccactcccaccacatcatcat

SEQ ID NO: 1163 - DNA, 1551 bp, Artificial Sequence
  Synthetic
aatcccagggagaactttcttaagtgtttcagtaaacatatcccaaataacgtggcgaatccgaaattagtatacacgcaaaatgattctctatattcgagcattctgaatagtaccattcaaaacttgcgctttacttcggacacaactccaaagcctttagtcatagttactccttcaaatgtctcccatattcaggctacaatcctctgctctaaaaaagttgggttgcaaatacgtactagatcaggaggccacgatgccgaaggtatgtcttatatctcccaagtgccattcgttgtcgtcgacttgaggaacatgcattctattaagattgatgtagaatcccagaccgcatgggttgaagctggtgccacattaggtgaagtatactattggataaacgagaaaaatgaaaatttatcgtttcctggaggctattgtccaactgttggtgtcggtggtcatttctcaggcgggggctacggagcattgatgcgaaactacggactagcagctgataacattatagacgcccatctcgtgaatgtggatggtaaagttcttgatagaaagagcatgggtgaagatttgttttgggcgatcagaggcggtggaggggaaaactttggtattattgcggcttggaaaataaagctggtcgatgttccctcgaaagtaacaatcttttctgtaaagaaaaatatggaaatacatgggttggtcaagttattcaataaatggcaaaacattgcttataagtatgataaagacctccttctgatgactcattttattacgaaaaatattaccgacaatcacggtaagaataaaactacagtgcacggttacttttcttcaattttccatggtggcgttgactctctagtagatttaatgaacaaaagtttccctgagttagggatcaagaaagaggattgtaaagaactatcttggatcgacacaaccatattctattcgggtgttgttaactttaataccgcaaactttaaaaaggaaattttgttagatcgctctgctggaaagaaaacagcatttagtatcaaacttgactatgtaaagaaaccgatacccgagactgccatggttaagatacttgagaagctatacgaagaggatgtgggagctggcatgtacgttctctacccttacggcggtataatggacgaaatttcagaatccgcaatcccattcccacacagagcaggtattatgtatgaactgtggtatactgcctcatgggagaaacaagaagataacgaaaaacacattaattgggtccgtagcgtctacaatttcactacaccatatgtatccaagaacccgagattggcttacttgaattatagagacttggatctaggaaaaaataatcatgaaagcccgaataattatacacaggcaaggatttggggcgagaagtatttcggcaagaacttcaacagattagtaaaagttaagaccaaagttgaccccaataacttttttagaaatgaacaaagtatccctccactcccaccacatcatcat

SEQ ID NO: 1164 - DNA, 1551 bp, Artificial Sequence
  Synthetic
aatcccagggagaactttcttaagtgtttcagtaaacatatcccaaataacgtggcgaatccgaaattagtatacacgcaaaatgattcactatattctagcattctgaatagtaccattcaaaacttgcgctttatatcggacacaactccaaagcctttagtcatagttactccttcaaatgtttcccatattcaggctacaatcctctgctctaaaaaagttgggttgcaaatacgtactagatcaggaggccacgatgccgaaggtatgtcttatatctcccaagtgccattcgttgtcgtcgacttgaggaacatgcattctattaagattgatgtacactcccagaccgcatgggttgaagctggtgccacattaggtgaagtatactattggataaacgagaaaaatgaaaatttatcgtttcctggaggctattgtccaactgttggtgtcggtggtcatttctcaggcgggggctacggagcattgatgcgaaactacggactagcagctgataacattatagacgcccatctcgtgaatgtggatggtaaagttcttgatagaaagagcatgggtgaagatttgttttgggcgatcagaggcggtggaggggaaaactttggtattattgcggcttggaaaataaagctggtcgatgttccctcgaaagtcacaatcttttctgtaaagaaaaatatggaaatacatgggttggtcaagttattcaataaatggcaaaacattgcttataagtatgataaagacctcgttctgatgactcattttattacgaaaaatattaccgacaatcacggtaagaataaaactacagtgcacggttacttttcttcaattttccatggtggcgttgactctctagtagatttaatgaacaaaagtttccctgagttagggatcaagaaagaagattgtaaagaattgtcttggatcgacacaaccatattctattcgggtgttgttaactttaataccgcaaactttaaaaaggaaattttgttagatcgctctgctggaaagaaaacagcatttagtatcaaacttgactatgtaaagaaaccgatacccgagactgccatggttaagatacttgagaagctatacgaagaggatgtgggagctggcatgtacgttctctacccttacggcggtataatggaagaaatttcagaatccgcaatcccattcccacacagagcaggtattatgtatgaactgtggtatactgcctcatgggagaaacaagaagataacgaaaaacacattaattgggtccgtagcgtctacaatttcactacaccatatgtatccaagaacccgagattggcttacttgaattatagagacttggatctaggaaaaaacaatgaagagagcccgaataattatacacaggcaaggatttggggcgagaagtatttcggcaagaacttcaacagattagtaaaagttaagaccaaagttgaccccaataacttttttagaaatgaacaaagtatccctccactcccaccacatcatcat

SEQ ID NO: 1165 - DNA, 1551 bp, Artificial Sequence
  Synthetic
aatccccaagagaactttcttaagtgtttcagtaaacatatcccaaataacgtggcgaatgcaaaattagtatacacgcaaaacgattctctatattcaagcattctgaatagtaccattcaaaacttgcgctttacatcggacacaactccaaagcctttagtcatagttactccttcaaatgtttcccatattcaggctacaatcctctgctctaaaaaagttgggttgcaaatacgtactagatcaggaggccacgatgccgaaggtatgtcttatatctcccaagtgccattcgttgtcgtcgacttgaggaacatgcattctattaagattgatgtacactcccagaccgcatgggttgaagctggtgccacattaggtgaagtatactattggataaacgagaaaaatgaaaatttatcgtttcctggaggctattgtccaactgttggtgtcggtggtcatttctcaggcgggggctacggagcattgatgcgaaactacggactagcagctgataacattatagacgcccatctcgtgaatgtggatggtaaagttcttgatagaaagagcatgggtgaagatttgttttgggcgatcagaggcggtggaggggaaaactttggtattattgcggcttggaaaataaagctggtcccggttccctcgaaagtaacaatcttttctgtaaagaaaaatatggaaatacatgggttggtcaagttattcaataaatggcaaaacattgcttataagtatgataaagacctcgttctgatgactcattttattacgaaaaatattaccgacaatcacggtaagaataaaactacagtgcacggttacttttcttcaattttccatggtggcgttgactctctagtagatttaatgaacaaaagtttccctgagttagggatcaagaaagaagattgtaaagaattatcttggatcgacacaaccatattctattcgggtgttgttaactttaataccgcaaactttaaaaaggaaattttgttagatcgctctgctggaaagaaaacagcatttagtatcaaacttgactatgtaaagaaaccgatacccgagactgccatggttaagatacttgagaagctatacgaagaggatgtgggagctggcatgtacgttctctacccttacggcggtataatggatgaaatttcagaatccgcaatcccattcccacacagagcaggtattatgtatgaactgtggtatactgcctcatgggagaaacaagaagataacgaaaaacacattaattgggtccgtagcgtctacaatttcactacaccatatgtatccaaaaacccgagattggcttacttgaattatagagacttggatctaggaaaaaataatgaggaaagcccgaataattatacacaggcaaggatttggggcgagaagtatttcggcaagaacttcaacagattagtaaaagttaagaccaaagttgaccccaataacttttttagaaatgaacaaagtatccctccactcccaccacatcatcat

SEQ ID NO: 1166 - DNA, 1551 bp, Artificial Sequence
  Synthetic
aatccccaggagaactttcttaagtgtttcagtaaacatatcccaaataacgtggcgaatccgaaattagtatacacgcaaaacgattccctatatatgagcattctgaatagtaccattcaaaacttgcgctttacttcggacacaactccaaagcctttagtcatagttactccttcaaatgtttcccatattcaggctacaatcctctgctctaaaaaagttgggttgcaaatacgtactagatcaggaggccacgatgccgaaggtatgtcttatatctcccaagtgccattcgttgtcgtcgacttgaggaacatgcattctattaagattgatgtagaatcccagaccgcatgggttgaagctggtgccacattaggtgaagtatactattggataaacgagaaaaatgaaaatttatcgtttcctggaggctattgtccaactgttggtgtcggtggtcatttctcaggcgggggctacggagcattgatgcgaaactacggactagcagctgataacattatagacgcccatctcgtgaatgtggatggtaaagttcttgatagaaagagcatgggtgaagatttgttttgggcgatcagaggcggtggaggggaaaactttggtattattgcggcttggaaaataaagctggtcccggttccctcgaaagtaacaatcttttctgtaaagaaaaatatggaaatacatgggttggtcaagttattcaataaatggcaaaacattgcttataagtatgataaagacctcgttctgatgactcattttattacgaaaaatattaccgacaatcacggtaagaataaaactacagtgcacggttacttttcttcaattttccatggtggcgttgactctctagtagatttaatgaacaaaagtttccctgagttagggatcaagaaaacggattgtaaagaactgtcttggatcgacacaaccatattctattcgggtgttgttaactttaataccgcaaactttaaaaaggaaattttgttagatcgctctgctggaaagaaaacagcatttagtatcaaacttgactatgtaaagaaaccgatacccgagactgccatggttaagatacttgagaagctatacgaagaggatgtgggagctggcatgtacgttctctacccttacggcggtataatggaagaaatttcagaatccgcaatcccattcccacacagagcaggtattatgtatgaactgtggtatactgcctcatgggagaaacaagaagataacgaaaaacacattaattgggtccgtagcgtctacaatttcactacaccatatgtatccaagaacccgagattggcttacttgaattatagagacttggatctaggaaaaaataatgaggaaagcccgaataattatacacaggcaaggatttggggcgagaagtatttcggcaagaacttcaacagattagtaaaagttaagaccaaagttgaccccaataacttttttagaaatgaacaaagtatccctccactcccaccacatcatcat

SEQ ID NO: 1167 - DNA, 1551 bp, Artificial Sequence
  Synthetic
aatccccaagagaactttcttaagtgtttcagtaaacatatcccaaataacgtggcgaatccgaaattagtatacacgcaaaacgatcagctatatatgagcattctgaatagtaccattcaaaacttgcgctttacatcggacacaactccaaagcctttagtcatagttactccttcaaatgtttcccatattcaggctacaatcctctgctctaaaaaagttgggttgcaaatacgtactagatcaggaggccacgatgccgaaggtatgtcttatatctcccaagtgccattcgttgtcgtcgacttgaggaacatgcattctattaagattgatgtacactcccagaccgcatgggttgaagctggtgccacattaggtgaagtatactattggataaacgagaaaaatgaaaatttatcgtttcctggaggctattgtccaactgttggtgtcggtggtcatttctcaggcgggggctacggagcattgatgcgaaactacggactagcagctgataacattatagacgcccatctcgtgaatgtggatggtaaagttcttgatagaaagagcatgggtgaagatttgttttgggcgatcagaggcggtggaggggaaaactttggtattattgcggcttggaaaataaagctggtccctgttccctcgaaagtcacaatcttttctgtaaagaaaaatatggaaatacatgggttggtcaagttattcaataaatggcaaaacattgcttataagtatgataaagacctcgttctgatgactcattttattacgaaaaatattaccgacaatcacggtaagaataaaactacagtgcacggttacttttcttcaattttccatggtggcgttgactctctagtagatttaatgaacaaaagtttccctgagttagggatcaagaaaacggattgtaaagaattgtcttggatcgacacaaccatattctattcgggtgttgttaactttaataccgcaaactttaaaaaggaaattttgttagatcgctctgctggaaagaaaacagcatttagtatcaaacttgactatgtaaagaaaccgatacccgagactgccatggttaagatacttgagaagctatacgaagaggatgtgggagctggcatgtacgttctctacccttacggcggtataatggatgaaatttcagaatccgcaatcccattcccacacagagcaggtattatgtatgaactgtggtatactgcctcatgggagaaacaagaagataacgaaaaacacattaattgggtccgtagcgtctacaatttcactacaccatatgtatccaagaacccgagattggcttacttgaattatagagacttggatctaggaaaaaataatgaagagagcccgaataattatacacaggcaaggatttggggcgagaagtatttcggcaagaacttcaacagattagtaaaagttaagaccaaagttgaccccaataacttttttagaaatgaacaaagtatccctccactcccaccacatcatcat

SEQ ID NO: 1168 - DNA, 1551 bp, Artificial Sequence
  Synthetic
aatcccagggagaactttcttaagtgtttcagtaaacatatcccaaataacgtggcgaatccgaaattagtatacacgcaaaatgatagcctatattctagcattctgaatagtaccattcaaaacttgcgctttacttcggacacaactccaaagcctttagtcatagttactccttcaaatgtttcccatattcaggctacaatcctctgctctaaaaaagttgggttgcaaatacgtactagatcaggaggccacgatgccgaaggtatgtcttatatctcccaagtgccattcgttgtcgtcgacttgaggaacatgcattctattaagattgatgtagaatcccagaccgcatgggttgaagctggtgccacattaggtgaagtatactattggataaacgagaaaaatgaaaatttatcgtttcctggaggctattgtccaactgttggtgtcggtggtcatttctcaggcgggggctacggagcattgatgcgaaactacggactagcagctgataacattatagacgcccatctcgtgaatgtggatggtaaagttcttgatagaaagagcatgggtgaagatttgttttgggcgatcagaggcggtggaggggaaaactttggtattattgcggcttggaaaataaagctggtcgacgttccctcgaaagtaacaatcttttctgtaaagaaaaatatggaaatacatgggttggtcaagttattcaataaatggcaaaacattgcttataagtatgataaagacctcttgctgatgactcattttattacgaaaaatattaccgacaatcacggtaagaataaaactacagtgcacggttacttttcttcaattttccatggtggcgttgactctctagtagatttaatgaacaaaagtttccctgagttagggatcaagaaaacggattgtaaagaactttcttggatcgacacaaccatattctattcgggtgttgttaactttaataccgcaaactttaaaaaggaaattttgttagatcgctctgctggaaagaaaacagcatttagtatcaaacttgactatgtaaagaaaccgatacccgagactgccatggttaagatacttgagaagctatacgaagaggatgtgggagctggcatgtacgttctctacccttacggcggtataatggatgaaatttcagaatccgcaatcccattcccacacagagcaggtattatgtatgaactgtggtatactgcctcatgggagaaacaagaagataacgaaaaacacattaattgggtccgtagcgtctacaatttcactacaccatatgtatccaagaacccgagattggcttacttgaattatagagacttggatctaggaaaaaataatcatgagagcccgaataattatacacaggcaaggatttggggcgagaagtatttcggcaagaacttcaacagattagtaaaagttaagaccaaagttgaccccaataacttttttagaaatgaacaaagtatccctccactcccaccacatcatcat

SEQ ID NO: 1169 - DNA, 1548 bp, Artificial Sequence
  Synthetic
aatccaagagaaaatttcttgaagtgtttttctcagtatatcccgaataatgcgacgaaccttaacttagtatacactcagaacaaccctctatatatgagcgttctaaattctacaatccacaacctaagatttacgtccgacacgactccgaaacccctagttatagtgacaccgtcacatgttagccatatacaggccaccatactatgttccaaaaaagttgggttacaaatacgtacccgtagcgggggacacgacagtgaggggatgagttatattagtcaggtgcctttcgtcatagtggatttaagaaatatgaggtcaattaaaatcgacgttcactcacaaactgcctgggttgaggcgggggccacattgggtgaagtatattactgggtcaatgagaagaacgagaatctttcactagcagccggttattgtcccacagtctgcgccggcggtcactttggcggcggcggatacggtcccttaatgagaaattacgggcttgccgcagacaatatcatagatgctcacttagttaatgttaacggaaaagtgttagaccgtaaaagcatgggggaggatctgttttgggcgcttagagggggaggggcagaatcatttggaataatagtggcatggaaaatcaggcttgtggctgttccaaagagtaccatgttctcagtaaagaaaataatggagatccatgagctagttaaacttgtgaataaatggcaaaacatagcctataaatatgataaggacttgctgcttatgactcatttcataaccagaaacattacggataaccaagggaagaacaaaacagccatccatacctactttagctccgttttcttgggtggtgtagacagcttagttgacctgatgaacaagagttttccggaactaggtatcaagaaggaagattgtagagaaatgtcctggattgataccataatcttttacagcggagtcgtcaattatgacactgacaacttcaacaaggaaattttattagataggagtgcgggtcaaaatggggccttcaagatcaaactagactacgttaaaaaacccattcctgaaagtgtttttgttcagattctggagaagctgtatgaagaagatattggtgcgggtatgtacgtactttatccgtacggcggcataatggatgagattagtgaaagcgccatccctttcccccacagagctggtatcctgtacgagttgtggtatatctgctcctgggagaaacaggaggataacgaaaagcacttaaattggattaggaatatctacaatttcatgacgccctacgtttccaagaaccccaggttggcctatttgaactacagggatcttgatattggaatcaacgaccccaaaaacccaaacaactacacccaggcaaggatttggggagagaagtacttcgggaagaacttcgacaggctagttaaggtgaaaacgctagttgatccaaataattttttcagaaacgaacagagtatccctcccttaccgcgtcataggcac

SEQ ID NO: 1170 - DNA, 1548 bp, Artificial Sequence
  Synthetic
aatccaagagaaaatttcttgaagtgtttttctcagtatatcccgaataatgcgacgaaccttaagttagtatacactcagaacaaccctctatatatgagcgttctaaattctacaatccacaacctaagatttacgtccgacacgactccgaaacccctagttatagtgacaccgtcacattgcagccatatacaggccaccatactatgttccaaaaaagttgggttacaaatacgtacccgtagcgggggacacgacagtgaggggatgagttatattagtcaggtgcctttcgtcatagtggatttaagaaatatgaggtcaattaaaatcgacgttcactcacaaactgcctgggttgaggcgggggccacattgggtgaagtatattactgggtcaatgagaagaacgagaatctttcactagcagccggttattgtcccacagtctgcgccggcggtcactttggcggcggcggatacggtcccttaatgagaaattacgggcttgccgcagacaatatcatagatgctcacttagttaatgttcatggaaaagtgttagaccgtaaaagcatgggggaggatctgttttgggcgcttagagggggaggggcagaatcatttggaataatagtggcatggaaaatcaggcttgtggctgttccaaagagtaccatgttctcagtaaagaaaataatggagatccatgagctagttaaacttgtgaataaatggcaaaacatagcctataaatatgataaggacttgctgcttatgactcatttcataaccagaaacattacggataaccaagggaagaacaaaacagccatccatacctactttagctccgttttcttgggtggtgtagacagcttagttgacctgatgaacaagagttttccggaactaggtatcaagaaggaagattgtagagaactttcctggattgataccataatcttttacagcggagtcgtcaattatgacactgacaacttcaacaaggaaattttattagataggagtgcgggtcaaaatggggccttcaagatcaaactagactacgttaaaaaacccattcctgaaagtgtttttgttcagattctggagaagctgtatgaagaagatattggcgcgggtatgtacgtcctttatccgtacggcggcataatggatgagattagtgaaagcgccatccctttcccccacagagctggtatcctgtacgagttgtggtatatctgctcctgggagaaacaggaggataacgaaaagcacttaaattggattaggaatatctacaatttcatgacgccctacgtttccaagaaccccaggttggcctatttgaactacagggatcttgatattggaatcaacgaccccaaaaacccaaacaactacacccaggcaaggatttggggagagaagtacttcgggaagaacttcgacaggctagttaaggtgaaaacgctagttgatccaaataattttttcagaaacgaacagagtatccctcccttaccgcgtcataggcac

SEQ ID NO: 1171 - DNA, 1548 bp, Artificial Sequence
  Synthetic
aatccaagagaaaatttcttgaagtgtttttctcagtatatcccgaataatgcgacgaaccttaagttagtatacactcagaacaaccctctatatatgagcgttctaaattctacaatccacaacctaagatttacgtccgacacgactccgaaacccctagttatagtgacaccgtcacatgttagccatatacaggctaccatactatgttccaaaaaacatgggttacaaatacgtacccgtagcgggggacacgacagtgaggggatgagttatattagtcaggtgcctttcgtcatagtggatttaagaaatatgaggtcaattaaaatcgacgttcactcacaaactgcctgggttgaggcgggggccacattgggtgaagtatattactgggtcaatgagaagaacgagaatctttcactagcagccggttattgtcccacagtctgcgccggcggtcactttggcggcggcggatacggtcccttaatgagaaattacgggcttgccgcagacaatatcatagatgctcacttagttaatgttcatggaaaagtgttagaccgtaaaagcatgggggaggatctgttttgggcgcttagagggggaggggcagaatcatttggaataatagtggcatggaaaatcaggcttgtggctgttccaaagagtaccatgttctcagtaaagaaaataatggagatccatgagctagttaaacttgtgaataaatggcaaaacatagcctataaatatgataaggacttgctgcttatgactcatttcataaccagaaacattacggataaccaagggaagaacaaaacagccatccatacctactttagctccgttttcttgggtggtgtagacagcttagttgacctgatgaacaagagttttccggaactaggtatcaagaaggaagattgtagagaactttcctggattgataccataatcttttacagcggagtcgtcaattatgacactgacaacttcaacaaggaaattttattagataggagtgcgggtcaaaatggggccttcaagatcaaactagactacgttaaaaaacccattcctgaaagtgtttttgttcagattctggagaagctgtatgaagaagatattggtgcgggcatgtacgtactttatccgtacggcggcataatggatgagattagtgaaagcgccatccctttcccccacagagctggtatcctgtacgagttgtggtatatctgctcctgggagaaacaggaggataacgaaaagcacttaaattggattaggaatatctacaatttcatgacgccctacgtttccaagaaccccaggttggcctatttgaactacagggatcttgatattggaatcaacgaccccaaaaacccaaacaactacacccaggcaaggatttggggagagaagtacttcgggaagaacttcgacaggctagttaaggtgaaaacgctagttgatccaaataattttttcagaaacgaacagagtatccctcccttaccgcgtcataggcac

SEQ ID NO: 1172 - DNA, 1548 bp, Artificial Sequence
  Synthetic
aatccaagagaaaatttcttgaagtgtttttctcagtatatcccgaataatgcgacgaaccttaacttagtatacactcagaacaaccctctatatatgagcgttctaaattctacaatccacaacctaagatttacgtccgacacgactccgaaacccctagttatagtgacaccgtcacatgttagccatatacaggcaaccatactatgttccaaaaaagttgggttacaaatacgtacccgtagcgggggacacgacagtgaggggatgagttatattagtcaggtgcctttcgtcatagtggatttaagaaatatgaggtcaattaaaatcgacgttcactcacaaactgcctgggttgaggcgggggccacattgggtgaagtatattactgggtcaatgagaagaacgagaatctttcactagcagccggttattgtcccacagtctgcgccggcggtcactttggcggcggcggatacggtcccttaatgagaaattacgggcttgccgcagacaatatcatagatgctcacttagttaatgttaacggaaaagtgttagaccgtaaaagcatgggggaggatctgttttgggcgcttagagggggaggggcagaatcatttggaataatagtggcatggaaaatcaggcttgtggctgttccaaagagtaccatgttctcagtaaagaaaataatggagatccatgagctagttaaacttgtgaataaatggcaaaacatagcctataaatatgataaggacttgctgcttatgactcatttcataaccagaaacattacggataaccaagggaagaacaaaacagccatccatacctactttagctccgttttcttgggtggtgtagacagcttagttgacctgatgaacaagagttttccggaactaggtatcaagaaggaagattgtagagaaatgtcctggattgataccataatcttttacagcggagtcgtcaattatgacactgacaacttcaacaaggaaattttattagataggagtgcgggtcaaaatggggccttcaagatcaaactagactacgttaaaaaacccattcctgaaagtgtttttgttcagattctggagaagctgtatgaagaagatattggcgcggggatgtacgtactttatccgtacggcggcataatggatgagattagtgaaagcgccatccctttcccccacagagctggtatcctgtacgagttgtggtatatcgtatcctgggagaaacaggaggataacgaaaagcacttaaattggattaggaatatctacaatttcatgacgccctacgtttccaagaaccccaggttggcctatttgaactacagggatcttgatattggaatcaacgaccccaaaaacccaaacaactacacccaggcaaggatttggggagagaagtacttcgggaagaacttcgacaggctagttaaggtgaaaacgctagttgatccaaataattttttcagaaacgaacagagtatccctcccttaccgcgtcataggcac

SEQ ID NO: 1173 - DNA, 1548 bp, Artificial Sequence
  Synthetic
aatccaagagaaaatttcttgaagtgtttttctcagtatatcccgaataatgcgacgaaccttaagttagtatacactcagaacaaccctctatatatgagcgttctaaattctacaatccacaacctaagatttacgtccgacacgactccgaaacccctagttatagtgacaccgtcacatgttagccatatacaggcaaccatactatgttccaaaaaagttgggttacaaatacgtacccgtagcgggggacacgacagtgaggggatgagttatattagtcaggtgcctttcgtcatagtggatttaagaaatatgaggtcaattaaaatcgacgttcactcacaaactgcctgggttgaggcgggggccacattgggtgaagtatattactgggtcaatgagaagaacgagaatctttcactagcagccggttattgtcccacagtcggcgccggcggtcactttggcggcggcggatacggtcccttaatgagaaattacgggcttgccgcagacaatatcatagatgctcacttagttaatgttcatggaaaagtgttagaccgtaaaagcatgggggaggatctgttttgggcgcttagagggggaggggcagaatcatttggaataatagtggcatggaaaatcaggcttgtggctgttccaaagagtaccatgttctcagtaaagaaaataatggagatccatgagctagttaaacttgtgaataaatggcaaaacatagcctataaatatgataaggacttgctgcttatgactcatttcataaccagaaacattacggataaccaagggaagaacaaaacagccatccatacctactttagctccgttttcttgggtggtgtagacagcttagttgacctgatgaacaagagttttccggaactaggtatcaagaaggaagattgtagagaactttcctggattgataccataatcttttacagcggagtcgtcaattatgacactgacaacttcaacaaggaaattttattagataggagtgcgggtcaaaatggggccttcaagatcaaactagactacgttaaaaaacccattcctgaaagtgtttttgttcagattctggagaagctgtatgaagaagatattggtgcgggtatgtacgtactttatccgtacggcggcataatggatgagattagtgaaagcgccatccctttcccccacagagctggtatcctgtacgagttgtggtatatctgctcctgggagaaacaggaggataacgaaaagcacttaaattggattaggaatatctacaatttcatgacgccctacgtttccaagaaccccaggttggcctatttgaactacagggatcttgatattggaatcaacgaccccaaaaacccaaacaactacacccaggcaaggatttggggagagaagtacttcgggaagaacttcgacaggctagttaaggtgaaaacgctagttgatccaaataattttttcagaaacgaacagagtatccctcccttaccgcgtcataggcac

SEQ ID NO: 1174 - DNA, 1548 bp, Artificial Sequence
  Synthetic
aatccaagagaaaatttcttgaagtgtttttctcagtatatcccgaataatgcgacgaaccttaagttagtatacactcagaacaaccctctatatatgagcgttctaaattctacaatccacaacctaagatttacgtccgacacgactccgaaacccctagttatagtgacaccgtcacatgttagccatatacaggccaccatactatgttccaaaaaagttgggttacaaatacgtacccgtagcgggggacacgacagtgaggggatgagttatattagtcaggtgcctttcgtcatagtggatttaagaaatatgaggtcaattaaaatcgacgttcactcacaaactgcctgggttgaggcgggggccacattgggtgaagtatattactgggtcaatgagaagaacgagaatctttcactagcagccggttattgtcccacagtctgcgccggcggtcactttggcggcggcggatacggtcccttaatgagaaattacgggcttgccgcagacaatatcatagatgctcacttagttaatgttcatggaaaagtgttagaccgtaaaagcatgggggaggatctgttttgggcgcttagagggggaggggcagaatcatttggaataatagtggcatggaaaatcaggcttgtggctgttccaaagagtaccatgttctcagtaaagaaaataatggagatccatgagctagttaaacttgtgaataaatggcaaaacatagcctataaatatgataaggacttgctgcttatgactcatttcataaccagaaacattacggataaccaagggaagaacaaaacagccatccatacctactttagctccgttttcttgggtggtgtagacagcttagttgacctgatgaacaagagttttccggaactaggtatcaagaaggaagattgtagagaactttcctggattgataccataatcttttacagcggagtcgtcaattatgacactgacaacttcaacaaggaaattttattagataggagtgcgggtcaaaatggggccttcaagatcaaactagactacgttaaaaaacccattcctgaaagtgtttttgttcagattctggagaagctgtatgaagaagatattggtgcgggtatgtacgtactttatccgtacggcggcataatggatgagattagtgaaagcgccatccctttcccccacagagctggtatcctgtacgagttgtggtatatctgctcctgggagaaacaggaggataacgaaaagcacttaaattggattaggaatatctacaattatatgacgccctacgtttccaagaaccccaggttggcctatttgaactacagggatcttgatattggaatcaacgaccccaaaaacccaaacaactacacccaggcaaggatttggggagagaagtacttcgggaagaacttcgacaggctagttaaggtgaaaacgctagttgatccaaataattttttcagaaacgaacagagtatccctcccttaccgcgtcataggcac

SEQ ID NO: 1175 - DNA, 1548 bp, Artificial Sequence
  Synthetic
aatccaagagaaaatttcttgaagtgtttttctcagtatatcccgaataatgcgacgaaccttaagttagtatacactcagaacaaccctctatatatgagcgttctaaattctacaatccacaacctaagatttacgtccgacacgactccgaaacccctagttatagtgacaccgtcacatgttagccatatacaggctaccatactatgttccaaaaaagttgggttacaaatacgtacccgtagcgggggacacgacagtgaggggatgagttatattagtcaggtgcctttcgtcatagtggatttaagaaatatgaggtcaattaaaatcgacgttcactcacaaactgcctgggttgaggcgggggccacattgggtgaagtatattactgggtcaatgagaagaacgagaatctttcactagcagccggttattgtcccacagtctgcgccggcggtcactttggcggcggcggatacggtcccttaatgagaaattacgggcttgccgcagacaatatcatagatgctcacttagttaatgttcatggaaaagtgttagaccgtaaaagcatgggggaggatctgttttgggcgcttagagggggaggggcagaatcatttggaataatagtggcatggaaaatcaggcttgtggctgttccaaagagtaccatgttctcagtaaagaaaataatggagatccatgagctagttaaacttgtgaataaatggcaaaacatagcctataaatatgataaggacttgctgcttatgactcatttcataaccagaaacattacggataaccaagggaagaacaaaacagccatccatacctactttagctccgttttcttgggtggtgtagacagcttagttgacctgatgaacaagagttttccggaactaggtatcaagaaggaagattgtagagaactttcctggattgataccataatcttttacagcggagtcgtcaattatgacactgacaacttcaacaaggaaattttattagataggagtgcgggtgctaatggggccttcaagatcaaactagactacgttaaaaaacccattcctgaaagtgtttttgttcagattctggagaagctgtatgaagaagatattggtgcgggtatgtacgtactttatccgtacggcggcataatggatgagattagtgaaagcgccatccctttcccccacagagctggtatcctgtacgagttgtggtatatctgctcctgggagaaacaggaggataacgaaaagcacttaaattggattaggaatatctacaatttcatgacgccctacgtttccaagaaccccaggttggcctatttgaactacagggatcttgatattggaatcaacgaccccaaaaacccaaacaactacacccaggcaaggatttggggagagaagtacttcgggaagaacttcgacaggctagttaaggtgaaaacgctagttgatccaaataattttttcagaaacgaacagagtatccctcccttaccgcgtcataggcac

SEQ ID NO: 1176 - DNA, 1548 bp, Artificial Sequence
  Synthetic
aatccaagagaaaatttcttgaagtgtttttctcagtatatcccgaataatgcgacgaaccttaacttagtatacactcagaacaaccctctatatatgagcgttctaaattctacaatccacaacctaagatttacgtccgacacgactccgaaacccctagttatagtgacaccgtcacatgttagccatatacaggctaccatactatgttccaaaaaagttgggttacaaatacgtacccgtagcgggggacacgacagtgaggggatgagttatattagtcaggtgcctttcgtcatagtggatttaagaaatatgaggtcaattaaaatcgacgttcactcacaaactgcctgggttgaggcgggggccacattgggtgaagtatattactgggtcaatgagaagaacgagaatctttcactagcagccggttattgtcccacagtctgcgccggcggtcactttggcggcggcggatacggtcccttaatgagaaattacgggcttgccgcagacaatatcatagatgctcacttagttaatgttaacggaaaagtgttagaccgtaaaagcatgggggaggatctgttttgggcgattagagggggaggggcagaatcatttggaataatagtggcatggaaaatcaggcttgtggctgttccaaagagtaccatgttctcagtaaagaaaataatggagatccatgagctagttaaacttgtgaataaatggcaaaacatagcctataaatatgataaggacttgctgcttatgactcatttcataaccagaaacattacggataaccaagggaagaacaaaacagccatccatacctactttagctccgttttcttgggtggtgtagacagcttagttgacctgatgaacaagagttttccggaactaggtatcaagaaggaagattgtagagaaatgtcctggattgataccataatcttttacagcggagtcgtcaattatgacactgacaacttcaacaaggaaattttattagataggagtgcgggtcaaaatggggccttcaagatcaaactagactacgttaaaaaacccattcctgaaagtgtttttgttcagattctggagaagctgtatgaagaagatattggcgcggggatgtacgtcctttatccgtacggcggcataatggatgagattagtgaaagcgccatccctttcccccacagagctggtatcctgtacgagttgtggtatatctgctcctgggagaaacaggaggataacgaaaagcacttaaattggattaggaatatctacaatttcatgacgccctacgtttccaagaaccccaggttggcctatttgaactacagggatcttgatattggaatcaacgaccccaaaaacccaaacaactacacccaggcaaggatttggggagagaagtacttcgggaagaacttcgacaggctagttaaggtgaaaacgctagttgatccaaataattttttcagaaacgaacagagtatccctcccttaccgcgtcataggcac

SEQ ID NO: 1177 - DNA, 1548 bp, Artificial Sequence
  Synthetic
aatccaagagaaaatttcttgaagtgtttttctcagtatatcccgaataatgcgacgaaccttaagttagtatacactcagaacaaccctctatatatgagcgttctaaattctacaatccacaacctaagatttacgtccgacacgactccgaaacccctagttatagtgacaccgtcacatgttagccatatacaggcaaccatactatgttccaaaaaagttgggttacaaatacgtacccgtagcgggggacacgacagtgaggggatgagttatattagtcaggtgcctttcgtcatagtggatttaagaaatatgaggtcaattaaaatcgacgttcactcacaaactgcctgggttgaggcgggggccacattgggtgaagtatattactgggtcaatgagaagaacgagaatctttcactagcagccggttattgtcccacagtctgcgccggcggtcactttggcggcggcggatacggtcccttaatgagaaattacgggcttgccgcagacaatatcatagatgctcacttagttaatgttcatggaaaagtgttagaccgtaaaagcatgggggaggatctgttttgggcgcttagagggggaggggcagaatcatttggaataatagtggcatggaaaatcaggcttgtggctgttccaaagagtaccatgttctcagtaaagaaaataatggagatccatgagctagttaaacttgtgaataaatggcaaaacatagcctataaatatgataaggacttgctgcttatgactcatttcataaccagaaacattacggataaccaagggaagaacaaaacagccatccatacctactttagctccgttttcttgggtggtgtagacagcttagttgacctgatgaacaagagttttccggaactaggtatcaagaaggaagattgtagagaactttcctggattgataccataatcttttacagcggagtcgtcaattatgacactgacaacttcaacaaggaaattttattagataggagtgcgggtcaaaatggggccttcaagatcaaactagactttgttaaaaaacccattcctgaaagtgtttttgttcagattctggagaagctgtatgaagaagatattggtgcgggtatgtacgtactttatccgtacggcggcataatggatgagattagtgaaagcgccatccctttcccccacagagctggtatcctgtacgagttgtggtatatctgctcctgggagaaacaggaggataacgaaaagcacttaaattggattaggaatatctacaatttcatgacgccctacgtttccaagaaccccaggttggcctatttgaactacagggatcttgatattggaatcaacgaccccaaaaacccaaacaactacacccaggcaaggatttggggagagaagtacttcgggaagaacttcgacaggctagttaaggtgaaaacgctagttgatccaaataattttttcagaaacgaacagagtatccctcccttaccgcgtcataggcac

SEQ ID NO: 1178 - DNA, 1548 bp, Artificial Sequence
  Synthetic
aatccaagagaaaatttcttgaagtgtttttctcagtatatcccgaataatgcgacgaaccttaacttagtatacactcagaacaaccctctatatatgagcgttctaaattctacaatccacaacctaagatttacgtccgacacgactccgaaacccctagttatagtgacaccgtcacatgttagccatatacaggcaaccatactatgtgctaaaaaagttgggttacaaatacgtacccgtagcgggggacacgacagtgaggggatgagttatattagtcaggtgcctttcgtcatagtggatttaagaaatatgaggtcaattaaaatcgacgttcactcacaaactgcctgggttgaggcgggggccacattgggtgaagtatattactgggtcaatgagaagaacgagaatctttcactagcagccggttattgtcccacagtctgcgccggcggtcactttggcggcggcggatacggtcccttaatgagaaattacgggcttgccgcagacaatatcatagatgctcacttagttaatgttaacggaaaagtgttagaccgtaaaagcatgggggaggatctgttttgggcgcttagagggggaggggcagaatcatttggaataatagtggcatggaaaatcaggcttgtggctgttccaaagagtaccatgttctcagtaaagaaaataatggagatccatgagctagttaaacttgtgaataaatggcaaaacatagcctataaatatgataaggacttgctgcttatgactcatttcataaccagaaacattacggataaccaagggaagaacaaaacagccatccatacctactttagctccgttttcttgggtggtgtagacagcttagttgacctgatgaacaagagttttccggaactaggtatcaagaaggaagattgtagagaaatgtcctggattgataccataatcttttacagcggagtcgtcaattatgacactgacaacttcaacaaggaaattttattagataggagtgcgggtcaaaatggggccttcaagatcaaactagactacgttaaaaaacccattcctgaaagtgtttttgttcagattctggagaagctgtatgaagaagatattggcgcggggatgtacgtactttatccgtacggcggcataatggatgagattagtgaaagcgccatccctttcccccacagagctggtatcctgtacgagttgtggtatatctgctcctgggagaaacaggaggataacgaaaagcacttaaattggattaggaatatctacaatttcatgacgccctacgtttccaagaaccccaggttggcctatttgaactacagggatcttgatattggaatcaacaatcccaaaaacccaaacaactacacccaggcaaggatttggggagagaagtacttcgggaagaacttcgacaggctagttaaggtgaaaacgctagttgatccagataattttttcagaaacgaacagagtatccctcccttaccgcgtcataggcac

SEQ ID NO: 1179 - DNA, 1548 bp, Artificial Sequence
  Synthetic
aatccaagagaaaatttcttgaagtgtttttctcagtatatcccgaataatgcgacgaaccttaagttagtatacactcagaacaaccctctatatatgagcgttctaaattctacaatccacaacctaagatttacgtccgacacgactccgaaacccctagttatagtgacaccgtcacatgttagccatatacaggcaaccatactatgttccaaaaaagttgggttacaaatacgtacccgtagcgggggacacgacagtgaggggatgagttatattagtcaggtgcctttcgtcatagtggatttaagaaatatgaggtcaattaaaatcgacgttcactcacaaactgcctgggttgaggcgggggccacattgggtgaagtatattactgggtcaatgagaagaacgagaatctttcactagcagccggttattgtcccacagtctgcgccggcggtcactttggcggcggcggatacggtcccttaatgagaaattacgggcttgccgcagacaatatcatagatgctcacttagttaatgttcatggaaaagtgttagaccgtaaaagcatgggggaggatctgttttgggcgcttagagggggaggggcagaatcatttggaataatagtggcatggaaaatcaggcttgtggctgttccaaagagtaccatgttctcagtaaagaaaataatggagatccatgagctagttaaacttgtgaataaatggcaaaacatagcctataaatatgataaggacttgctgcttatgactcatttcataaccagaaacattacggataaccaagggaagaacaaaacagccatccatacctactttagctccgttttcttgggtggtgtagacagcttagttgacctgatgaacaagagttttccggaactaggtatcaagaaggaagattgtagagaactttcctggattgataccataatcttttacagcggagtcgtcaattatgacactgacaacttcaacaaggaaattttattagataggagtgcgggtcaaaatggggccttcaagatcaaactagactacgttaaaaaacccattcctgaaagtgtttttgttcagattctggagaagctgtatgaagaagatattggtgcgggtatgtacgtgcttattccgtacggcggcataatggatgagattagtgaaagcgccatccctttcccccacagagctggtatcctgtacgagttgtggtatatctgctcctgggagaaacaggaggataacgaaaagcacttaaattggattaggaatatctacaatttcatgacgccctacgtttccaagaaccccaggttggcctatttgaactacagggatcttgatattggaatcaacgaccccaaaaacccaaacaactacacccaggcaaggatttggggagagaagtacttcgggaagaacttcgacaggctagttaaggtgaaaacgctagttgatccaaataattttttcagaaacgaacagagtatccctcccttaccgcgtcataggcac

SEQ ID NO: 1180 - DNA, 1548 bp, Artificial Sequence
  Synthetic
aatccaagagaaaatttcttgaagtgtttttctcagtatatcccgaataatgcgacgaaccttaacttagtatacactcagaacaaccctctatatatgagcgttctaaattctacaatccacaacctaagatttacgtccgacacgactccgaaacccctagttatagtgacaccgtcacatgttagccatatacaggcaaccatactatgttccaaaaaagttgggttacaaatacgtacccgtagcgggggacacgacagtgaggggatgagttatattagtcaggtgcctttcgtcatagtggatttaagaaatatgaggtcaattaaaatcgacgttcactcacaaactgcctgggttgaggcgggggccacattgggtgaagtatattactgggtcaatgagaagaacgagaatctttcactagcagccggttattgtcccacagtctgcgccggcggtcactttggcggcggcggatacggtcccttaatgagaaattacgggcttgccgcagacaatatcatagatgctcacttagttaatgttaacggaaaagtgttagaccgtaaaagcatgggggaggatctgttttgggcgcttagagggggaggggcagaatcatttggaataatagtggcatggaaaatcaggcttgtggctgttccaaagagtaccatgttctcagtaaagaaaataatggagatccatgagctagttaaacttgtgaataaatggcaaaacatagcctataaatatgataaggacttgctgcttatgactcatttcataaccagaaacattacggataaccaagggaagaacaaaacagccatccatacctactttagctccgttttcttgggtggtgtagacagcttagttgacctgatgaacaagagttttccggaactaggtatcaagaaggaagattgtagagaaatgtcctggattgataccataatcttttacagcggagtcgtcaattatgacactgacaacttcaacaaggaaattttattagataggagtgcgggtcaaaatggggccttcaagatcaaactagactacgttaaaaaacccattcctgaaagtgtttttgttcagattctggagaagctgtatgaagaagatattggcgcggggatgtacgtactttatccgtacggcggcataatggatgagattagtgaaagcgccatccctttcccccacagagctggtatcctgtacgagatttggtatatctgctcctgggagaaacaggaggataacgaaaagcacttaaattggattaggaatatctacaatttcatgacgccctacgtttccaagaaccccaggttggcctatttgaactacagggatcttgatattggaatcaacgaccccaaaaacccaaacaactacacccaggcaaggatttggggagagaagtacttcgggaagaacttcgacaggctagttaaggtgaaaacgctagttgatccaaataattttttcagaaacgaacagagtatccctcccttaccgcgtcataggcac

SEQ ID NO: 1181 - DNA, 1548 bp, Artificial Sequence
  Synthetic
aatccaagagaaaatttcttgaagtgtttttctcagtatatcccgaataatgcgacgaaccttaagttagtatacactcagaacaaccctctatatatgagcgttctaaattctacaatccacaacctaagatttacgtccgacacgactccgaaacccctagttatagtgacaccgtcacatgttagccatatacaggcaaccatactatgttccaaaaaagttgggttacaaatacgtacccgtagcgggggacacgacagtgaggggatgagttatattagtcaggtgcctttcgtcatagtggatttaagaaatatgaggtcaattaaaatcgacgttcactcacaaactgcctgggttgaggcgggggccacattgggtgaagtatattactggattaatgagaagaacgagaatctttcactagcagccggttattgtcccacagtctgcgccggcggtcactttggcggcggcggatacggtcccttaatgagaaattacgggcttgccgcagacaatatcatagatgctcacttagttaatgttcatggaaaagtgttagaccgtaaaagcatgggggaggatctgttttgggcgcttagagggggaggggcagaatcatttggaataatagtggcatggaaaatcaggcttgtggctgttccaaagagtaccatgttctcagtaaagaaaataatggagatccatgagctagttaaacttgtgaataaatggcaaaacatagcctataaatatgataaggacttgctgcttatgactcatttcataaccagaaacattacggataaccaagggaagaacaaaacagccatccatacctactttagctccgttttcttgggtggtgtagacagcttagttgacctgatgaacaagagttttccggaactaggtatcaagaaggaagattgtagagaactttcctggattgataccataatcttttacagcggagtcgtcaattatgacactgacaacttcaacaaggaaattttattagataggagtgcgggtcaaaatggggccttcaagatcaaactagactacgttaaaaaacccattcctgaaagtgtttttgttcagattctggagaagctgtatgaagaagatattggcgcgggcatgtacgtactttatccgtacggcggcataatggatgagattagtgaaagcgccatccctttcccccacagagctggtatcctgtacgagttgtggtatatctgctcctgggagaaacaggaggataacgaaaagcacttaaattggattaggaatatctacaatttcatgacgccctacgtttccaagaaccccaggttggcctatttgaactacagggatcttgatattggaatcaacgaccccaaaaacccaaacaactacacccaggcaaggatttggggagagaagtacttcgggaagaacttcgacaggctagttaaggtgaaaacgctagttgatccaaataattttttcagaaacgaacagagtatccctcccttaccgcgtcataggcac

SEQ ID NO: 1182 - DNA, 1548 bp, Artificial Sequence
  Synthetic
aatccaagagaaaatttcttgaagtgtttttctcagtatatcccgaataatgcgacgaaccttaacttagtatacactcagaacaaccctctatatatgagcgttctaaattctacaatccacaacctaagatttacgtccgacacgactccgaaacccctagttatagtgacaccgtcacatgttagccatatacaggcaaccatactatgttccaaaaaagttgggttacaaatacgtacccgtagcgggggacacgacagtgaggggatgagttatattagtcaggtgcctttcgtcatagtggatttaagaaatatgaggtcaattaaaatcgacgttcactcacaaactgcctgggttgaggcgggggccacattgggtgaagtatattactgggtcaatgagaagaacgagaatctttcatttgcagccggttattgtcccacagtctgcgccggcggtcactttggcggcggcggatacggtcccttaatgagaaattacgggcttgccgcagacaatatcatagatgctcacttagttaatgttaacggaaaagtgttagaccgtaaaagcatgggggaggatctgttttgggcgcttagagggggaggggcagaatcatttggaataatagtggcatggaaaatcaggcttgtggctgttccaaagagtaccatgttctcagtaaagaaaataatggagatccatgagctagttaaacttgtgaataaatggcaaaacatagcctataaatatgataaggacttgctgcttatgactcatttcataaccagaaacattacggataaccaagggaagaacaaaacagccatccatacctactttagctccgttttcttgggtggtgtagacagcttagttgacctgatgaacaagagttttccggaactaggtatcaagaaggaagattgtagagaaatgtcctggattgataccataatcttttacagcggagtcgtcaattatgacactgacaacttcaacaaggaaattttattagataggagtgcgggtcaaaatggggccttcaagatcaaactagactacgttaaaaaacccattcctgaaagtgtttttgttcagattctggagaagctgtatgaagaagatattggcgcggggatgtacgtactttatccgtacggcggcataatggatgagattagtgaaagcgccatccctttcccccacagagctggtatcctgtacgagttgtggtatatctgctcctgggagaaacaggaggataacgaaaagcacttaaattggattaggaatatctacaatttcatgacgccctacgtttccaagaaccccaggttggcctatttgaactacagggatcttgatattggaatcaacgaccccaaaaacccaaacaactacacccaggcaaggatttggggagagaagtacttcgggaagaacttcgacaggctagttaaggtgaaaacgctagttgatccaaataattttttcagaaacgaacagagtatccctcccttaccgcgtcataggcac

SEQ ID NO: 1183 - DNA, 1548 bp, Artificial Sequence
  Synthetic
aatccaagagaaaatttcttgaagtgtttttctcagtatatcccgaataatgcgacgaaccttaagttagtatacactcagaacaaccctctatatatgagcgttctaaattctacaatccacaacctaagatttacgtccgacacgactccgaaacccctagttatagtgacaccgtcacatgttagccatatacaggctaccatactatgttccaaaaaagttgggttacaaatacgtacccgtagcgggggacacgacagtgaggggatgagttatattagtcaggtgcctttcgtcatagtggatttaagaaatatgaggtcaattaaaatcgacgttcactcacaaactgcctgggttgaggcgggggccacattgggtgaagtatattactgggtcaatgagaagaacgagaatctttcactagcagccggttattgtcccacagtctgcgccggcggtcactttggcggcggcggatacggtcccttaatgagaaattacgggcttgccgcagacaatatcatagatgctcacttagttaatgttcatggaaaagtgttagaccgtaaaagcatgggggaggatctgttttgggcgcttagagggggaggggcagaatcatttggaataatagtggcatggaaaatcaggcttgtggctgttccaaagagtaccatgttctcagtaaagaaaataatggagatccatgagctagttaaacttgtgaataaatggcaaaacatagcctataaatatgataaggacttgctgcttatgactcatttcataaccagaaacattacggataaccaagggaagaacaaaacagccatccatacctactttagctccgttttcttgggtggtgtagacagcttagttgacctgatgaacaagagttttccggaactaggtatcaagaaggaagattgtagagaactttcctggattgataccataatcttttacagcggagtcgtcaattatgacactgacaacttcaacaaggaaattttattagataggagtgcgggtaataatggggccttcaagatcaaactagactacgttaaaaaacccattcctgaaagtgtttttgttcagattctggagaagctgtatgaagaagatattggtgcgggtatgtacgtactttatccgtacggcggcataatggatgagattagtgaaagcgccatccctttcccccacagagctggtatcctgtacgagttgtggtatatctgctcctgggagaaacaggaggataacgaaaagcacttaaattggattaggaatatctacaatttcatgacgccctacgtttccaagaaccccaggttggcctatttgaactacagggatcttgatattggaatcaacgaccccaaaaacccaaacaactacacccaggcaaggatttggggagagaagtacttcgggaagaacttcgacaggctagttaaggtgaaaacgctagttgatccaaataattttttcagaaacgaacagagtatccctcccttaccgcgtcataggcac

SEQ ID NO: 1184 - DNA, 1548 bp, Artificial Sequence
  Synthetic
aatccaagagaaaatttcttgaagtgtttttctcagtatatcccgaataatgcgacgaaccttaagttagtatacactcagaacaaccctctatatatgagcgttctaaattctacaatccacaacctaagatttacgtccgacacgactccgaaacccctagttatagtgacaccgtcacatgttagccatatacaggctaccatactatgttccaaaaaagttgggttacaaatacgtacccgtagcgggggacacgacagtgaggggatgagttatattagtatggtgcctttcgtcatagtggatttaagaaatatgaggtcaattaaaatcgacgttcactcacaaactgcctgggttgaggcgggggccacattgggtgaagtatattactgggtcaatgagaagaacgagaatctttcactagcagccggttattgtcccacagtctgcgccggcggtcactttggcggcggcggatacggtcccttaatgagaaattacgggcttgccgcagacaatatcatagatgctcacttagttaatgttcatggaaaagtgttagaccgtaaaagcatgggggaggatctgttttgggcgcttagagggggaggggcagaatcatttggaataatagtggcatggaaaatcaggcttgtggctgttccaaagagtaccatgttctcagtaaagaaaataatggagatccatgagctagttaaacttgtgaataaatggcaaaacatagcctataaatatgataaggacttgctgcttatgactcatttcataaccagaaacattacggataaccaagggaagaacaaaacagccatccatacctactttagctccgttttcttgggtggtgtagacagcttagttgacctgatgaacaagagttttccggaactaggtatcaagaaggaagattgtagagaactttcctggattgataccataatcttttacagcggagtcgtcaattatgacactgacaacttcaacaaggaaattttattagataggagtgcgggtcaaaatggggccttcaagatcaaactagactacgttaaaaaacccattcctgaaagtgtttttgttcagattctggagaagctgtatgaagaagatattggtgcgggtatgtacgtactttatccgtacggcggcataatggatgagattagtgaaagcgccatccctttcccccacagagctggtatcctgtacgagttgtggtatatctgctcctgggagaaacaggaggataacgaaaagcacttaaattggattaggaatatctacaatttcatgacgccctacgtttccaagaaccccaggttggcctatttgaactacagggatcttgatattggaatcaacgaccccaaaaacccaaacaactacacccaggcaaggatttggggagagaagtacttcgggaagaacttcgacaggctagttaaggtgaaaacgctagttgatccaaataattttttcagaaacgaacagagtatccctcccttaccgcgtcataggcac

SEQ ID NO: 1185 - DNA, 1548 bp, Artificial Sequence
  Synthetic
aatccaagagaaaatttcttgaagtgtttttctcagtatatcccgaataatgcgacgaaccttaacttagtatacactcagaacaaccctctatatatgagcgttctaaattctacaatccacaacctaagatttacgtccgacacgactccgaaacccctagttatagtgacaccgtcacatgttagccatatacaggctaccatactatgttccaaaaaagttgggttacaaatacgtacccgtagcgggggacacgacagtgaggggatgagttatattagtcaggtgcctttcgtcatagtggatttaagaaatatgaggtcaattaaaatcgacgttcactcacaaactgcctgggttgaggcgggggccacattgggtgaagtatattactgggtcaatgagaagaacgagaatctttcactagcagccggttattgtcccacagtctgcgccggcggtcactttggcggcggcggatacggtcccttaatgagaaattacgggcttgccgcagacaatatcatagatgctcacttagttaatgttaacggaaaagtgttagaccgtaaaagcatgggggaggatctgttttgggcgcttagagggggaggggcagaatcatttggaataatagtggcatggaaaatcaggcttgtggctgttccaaagagtaccatgttctcagtaaagaaaataatggagatccatgagctagttaaacttgtgaataaatggcaaaacatagcctataaatatgataaggacttgctgcttatgactcatatgataaccagaaacattacggataaccaagggaagaacaaaacagccatccatacctactttagctccgttttcttgggtggtgtagacagcttagttgacctgatgaacaagagttttccggaactaggtatcaagaaggaagattgtagagaaatgtcctggattgataccataatcttttacagcggagtcgtcaattatgacactgacaacttcaacaaggaaattttattagataggagtgcgggtcaaaatggggccttcaagatcaaactagactacgttaaaaaacccattcctgaaagtgtttttgttcagattctggagaagctgtatgaagaagatattggcgcggggatgtacgtactttatccgtacggcggcataatggatgagattagtgaaagcgccatccctttcccccacagagctggtatcctgtacgagttgtggtatatctgctcctgggagaaacaggaggataacgaaaagcacttaaattggattaggaatatctacaatttcatgacgccctacgtttccaagaaccccaggttggcctatttgaactacagggatcttgatattggaatcaacgaccccaaaaacccaaacaactacacccaggcaaggatttggggagagaagtacttcgggaagaacttcgacaggctagttaaggtgaaaacgctagttgatccaaataattttttcagaaacgaacagagtatccctcccttaccgcgtcataggcac

SEQ ID NO: 1186 - DNA, 1548 bp, Artificial Sequence
  Synthetic
aatccaagagaaaatttcttgaagtgtttttctcagtatatcccgaataatgcgacgaaccttaacttagtatacactcagaacaaccctctatatatgagcgttctaaattctacaatccacaacctaagatttacgtccgacacgactccgaaacccctagttatagtgacaccgtcacatgttagccatatacaggctaccatactatgttccaaaaaagttgggttacaaatacgtacccgtagcgggggacacgacagtgaggggatgagttatattagtcaggtgcctttcgtcatagtggatttaagaaatatgaggtcaattaaaatcgacgttcactcacaaactgcctgggttgaggcgggggccacattgggtgaagtatattactgggtcaatgagaagaacgagaatctttcactagcagccggttattgtcccacagtctgcgccggcggtcactttggcggcggcggatacggtcccttaatgagaaattacgggcttgccgcagacaatatcatagatgctcacttagttaatgttaacggaaaagtgttagaccgtaaaagcatgggggaggatctgttttgggcgcttagagggggaggggcagaatcatttggaataatagtggcatggaaaatcaggcttgtggctgttccaaagagtaccatgttctcagtaaagaaaataatggagatccatgagctagttaaacttgtgaataaatggcaaaacatagcctataaatatgataaggacttgctgcttatgactcatttcataaccagaaacattacggataaccaagggaagaacaaaacagccatccatacctactttagctccgttttcttgggtggtgtagacagcttagttgacctgatgaacaagagttttccggaactaggtatcaagaaggaagattgtagagaactttcctggattgataccataatcttttacagcggagtcgtcaattatgacactgacaacttcaacaaggaaattttattagataggagtgcgggtcaaaatggggccttcaagatcaaactagactacgttaaaaaacccattcctgaaagtgtttttgttcagattctggagaagctgtatgaagaagatattggagcgggtatgtacgtactttatccgtacggcggcataatggatgagattagtgaaagcgccatccctttcccccacagagctggtatcctgtacgagttgtggtatatctgctcctgggagaaacaggaggataacgaaaagcacttaaattggattaggaatatctacaatttcatgacgccctacgtttccaagaaccccaggttggcctatttgaactacagggatcttgatattggaatcaacgaccccaaaaacccaaacaactacacccaggcaaggatttggggagagaagtacttcgggaagaacttcgacaggctagttaaggtgaaaacgctagttgatccaaataattttttcagaaacgaacagagtatccctcccttaccgcgtcataggcac

SEQ ID NO: 1187 - DNA, 1548 bp, Artificial Sequence
  Synthetic
aatccaagagaaaatttcttgaagtgtttttctcagtatatcccgaataatgcgacgaaccttaacttagtatacactcagaacaaccctctatatatgagcgttctaaattctacaatccacaacctaagatttacgtccgacacgactccgaaacccctagttatagtgacaccgtcacatgttagccatatacaggccaccatactatgttccaaaaaagttgggttacaaatacgtacccgtagcgggggacacgacagtgaggggatgagttatattagtcaggtgcctttcgtcatagtggatttaagaaatatgaggtcaattaaaatcgacgttcactcacaaactgcctgggttgaggcgggggccacattgggtgaagtatattactgggtcaatgagaagaacgagaatctttcactagcagccggttattgtcccacagtctgcgccggcggtcactttggcggcggcggatacggtcccttaatgagaaattacgggcttgccgcagacaatatcatagatgctcacttagttaatgttaacggaaaagtgttagaccgtaaaagcatgggggaggatctgttttgggcgcttagagggggaggggcagaatcatttggaataatagtggcatggaaaatcaggcttgtggctgttccaaagagtaccatgttctcagtaaagaaaataatggagatccatgagctagttaaacttgtgaataaatggcaaaacatagcctataaatatgataaggacttgctgcttatgactcatttcataaccagaaacattacggataaccaagggaagaacaaaacagccatccatacctactttagctccgttttcttgggtggtgtagacagcttagttgacctgatgaacaagagttttccggaactaggtatcaagaaggaagattgtagagaaatgtcctggattgataccataatcttttacagcggagtcgtcaattatgacactgacaacttcaacaaggaaattttattagataggagtgcgggtcaaaatggggccttcaagatcaaactagactacgttaaaaaacccattcctgaaagtgtttttgttcagattctggagaagctgtatgaagaagatattggcgcggggatgtacgtcctttatccgtacggcggcataatggatgagattagtgaaagcgccatccctttcccccacagagctggtatcctgtacgagttgtggtatatctgctcctgggagaaacaggaggataacgaaaagcacttaaattggattaggaatatctacaatttcatgacgccctacgtttccaagaaccccaggttggcctatattaactacagggatcttgatattggaatcaacgaccccaaaaacccaaacaactacacccaggcaaggatttggggagagaagtacttcgggaagaacttcgacaggctagttaaggtgaaaacgctagttgatccaaataattttttcagaaacgaacagagtatccctcccttaccgcgtcataggcac

SEQ ID NO: 1188 - DNA, 1548 bp, Artificial Sequence
  Synthetic
aatccaagagaaaatttcttgaagtgtttttctcagtatatcccgaataatgcgacgaaccttaagttagtatacactcagaacaaccctctatatatgagcgttctaaattctacaatccacaacctaagatttacgtccgacacgactggaaaacccctagttatagtgacaccgtcacatgttagccatatacaggctaccatactatgttccaaaaaagttgggttacaaatacgtacccgtagcgggggacacgacagtgaggggatgagttatattagtcaggtgcctttcgtcatagtggatttaagaaatatgaggtcaattaaaatcgacgttcactcacaaactgcctgggttgaggcgggggccacattgggtgaagtatattactgggtcaatgagaagaacgagaatctttcactagcagccggttattgtcccacagtctgcgccggcggtcactttggcggcggcggatacggtcccttaatgagaaattacgggcttgccgcagacaatatcatagatgctcacttagttaatgttcatggaaaagtgttagaccgtaaaagcatgggggaggatctgttttgggcgcttagagggggaggggcagaatcatttggaataatagtggcatggaaaatcaggcttgtggctgttccaaagagtaccatgttctcagtaaagaaaataatggagatccatgagctagttaaacttgtgaataaatggcaaaacatagcctataaatatgataaggacttgctgcttatgactcatttcataaccagaaacattacggataaccaagggaagaacaaaacagccatccatacctactttagctccgttttcttgggtggtgtagacagcttagttgacctgatgaacaagagttttccggaactaggtatcaagaaggaagattgtagagaactttcctggattgataccataatcttttacagcggagtcgtcaattatgacactgacaacttcaacaaggaaattttattagataggagtgcgggtcaaaatggggccttcaagatcaaactagactacgttaaaaaacccattcctgaaagtgtttttgttcagattctggagaagctgtatgaagaagatattggtgcgggaatgtacgtactttatccgtacggcggcataatggatgagattagtgaaagcgccatccctttcccccacagagctggtatcctgtacgagttgtggtatatctgctcctgggagaaacaggaggataacgaaaagcacttaaattggattaggaatatctacaatttcatgacgccctacgtttccaagaaccccaggttggcctatttgaactacagggatcttgatattggaatcaacgaccccaaaaacccaaacaactacacccaggcaaggatttggggagagaagtacttcgggaagaacttcgacaggctagttaaggtgaaaacgctagttgatccaaataattttttcagaaacgaacagagtatccctcccttaccgcgtcataggcac

SEQ ID NO: 1189 - DNA, 1548 bp, Artificial Sequence
  Synthetic
aatccaagagaaaatttcttgaagtgtttttctcagtatatcccgaataatgcgacgaaccttaacttagtatacactcagaacaaccctctatatatgagcgttctaaattctacaatccacaacctaagatttacgtccgacacgactccgaaacccctagttatagtgacaccgtcacatgttagccatatacaggctaccatactatgttccaaaaaagttgggttacaaatacgtacccgtagcgggggacacgacagtgaggggatgagttatattagtcaggtgcctttcgtcatagtggatttaagaaatatgaggtcaattaaaatcgacgttcactcacaaactgcctgggttgaggcgggggccacattgggtgaagtatattactgggtcaatgagaagaacgagaatctttcactagcagccggttattgtcccacagtctgcgccggcggtcactttggcggcggcggatacggtcccttaatgagaaattacgggcttgccgcagacaatatcatagatgctcacttagttaatgttaacggaaaagtgttagaccgtaaaagcatgggggaggatctgttttgggcgcttagagggggaggggcagaatcatttggaataatagtggcatggaaaatcaggcttgtggctgttccaaagagtaccatgttctcagtaaagaaaataatggagatccatgagctagttaaacttgtgaataaatggcaaaacatagcctataaatatgataaggacttgctgcttatgactcatttcataaccagaaacattacggataaccaagggaagaacaaaacagccatccatacctactttagctccgttttcttgggtggtgtagacagcttagttgacctgatgaacaagagttttccggaactaggtatcaagaaggaagattgtagagaaatgtcctggattgataccataatcttttacagcggagtcgtcaattatgacactgacaacttcaacaaggaaattttattagataggagtgcgggtcaaaatggggccttcaagatcaaactagactttgttaaaaaacccattcctgaaagtgtttttgttcagattctggagaagctgtatgaagaagatattggcgcggggatgtacgtactttatccgtacggcggcataatggatgagattagtgaaagcgccatccctttcccccacagagctggtatcctgtacgagttgtggtatatctgctcctgggagaaacaggaggataacgaaaagcacttaaattggattaggaatatctacaatttcatgacgccctacgtttccaagaaccccaggttggcctatttgaactacagggatcttgatattggaatcaacgaccccaaaaacccaaacaactacacccaggcaaggatttggggagagaagtacttcgggaagaacttcgacaggctagttaaggtgaaaacgctagttgatccaaataattttttcagaaacgaacagagtatccctcccttaccgcgtcataggcac

SEQ ID NO: 1190 - DNA, 1548 bp, Artificial Sequence
  Synthetic
aatccaagagaaaatttcttgaagtgtttttctcagtatatcccgaataatgcgacgaaccttaacttagtatacactcagaacaaccctctatatatgagcgttctaaattctacaatccacaacctaagatttacgtccgacacgactccgaaacccctagttatagtgacaccgtcacatgttagccatatacaggccaccatactatgttccaaaaaagttgggttacaaatacgtacccgtagcgggggacacgacagtgaggggatgagttatattagtcaggtgcctttcgtcatagtggatttaagaaatatgaggtcaattaaaatcgacgttcactcacaaactgcctgggttgaggcgggggccacattgggtgaagtatattactgggtcaatgagaagaacgagaatctttcactagcagccggttattgtcccacagtctgcgccggcggtcactttggcggcggcggatacggtcccttaatgagaaattacgggcttgccgcagacaatatcatagatgctcacttagttaatgttaacggaaaagtgttagaccgtaaaagcatgggggaggatctgttttgggcgcttagagggggaggggcagaatcatttggaataatagtggcatggaaaatcaggcttgtggctgttccaaagagtaccatgttctcagtaaagaaaataatggagatccatgagctagttaaacttgtgaataaatggcaaaacatagcctataaatatgataaggacttgctgcttatgactcatttcataaccagaaacattacggataaccaagggaagaacaaaacagccatccatacctactttagctccgttttcttgggtggtgtagacagcttagttgacctgatgaacaagagttttccggaactaggtatcaagaaggaagattgtagagaaatgtcctggattgataccataatcttttacagcggagtcgtcaattatgacactgacaacttcaacaaggaaattttattagataggagtgcgggtcaattcggggccttcaagatcaaactagactacgttaaaaaacccattcctgaaagtgtttttgttcagattctggagaagctgtatgaagaagatattggcgcggggatgtacgtactttatccgtacggcggcataatggatgagattagtgaaagcgccatccctttcccccacagagctggtatcctgtacgagttgtggtatatctgctcctgggagaaacaggaggataacgaaaagcacttaaattggattaggaatatctacaatttcatgacgccctacgtttccaagaaccccaggttggcctatttgaactacagggatcttgatattggaatcaacgaccccaaaaacccaaacaactacacccaggcaaggatttggggagagaagtacttcgggaagaacttcgacaggctagttaaggtgaaaacgctagttgatccaaataattttttcagaaacgaacagagtatccctcccttaccgcgtcataggcac

SEQ ID NO: 1191 - DNA, 1548 bp, Artificial Sequence
  Synthetic
aatccaagagaaaatttcttgaagtgtttttctcagtatatcccgaataatgcgacgaaccttaacttagtatacactcagaacaaccctctatatatgagcgttctaaattctacaatccacaacctaagatttacgtccgacacgactccgaaacccctagttatagtgacaccgtcacatgttagccatatacaggcaaccatactatgttccaaaaaagttgggttacaaatacgtacccgtagcgggggacacgacagtgaggggatgagttatattagtcaggtgcctttcgtcatagtggatttaagaaatatgaggtcaattaaaatcgacgttcactcacaaactgcctgggttgaggcgggggccacattgggtgaagtatattactgggtcaatgagaagaacgagaatctttcactagcagccggttattgtcccacagtctgcgccggcggtcactttggcggcggcggatacggtcccttaatgagaaattacgggcttgccgcagacaatatcatagatgctcacttagttaatgttaacggaaaagtgttagaccgtaaaagcatgggggaggatctgttttgggcgcttagagggggaggggcagaatcatttggaataatagtggcatggaaaatcaggcttgtggctgttccaaagagtaccatgttctcagtaaagaaaataatggagatccatgagctagttaaacttgtgaataaatggcaaaacatagcctataaatatgataaggacttgctgcttatgactcatttcataaccagaaacattacggataaccaagggaagaacaaaacagccatccatacctactttagctccgttttcttgggtggtgtagacagcttagttgacctgatgaacaagagttttccggaactaggtatcaagaaggaagattgtagagaaatgtcctggattgataccataatcttttacagcggagtcgtcaattatgacactgacaacttcaacaaggaaattttattagataggagtgcgggtcaaaatggggccttcaagatcaaactagactacgttaaaaaacccattcctgaaagtgtttttgttcagattctggagaagctgtatgaagaagatattggcgcggggatgtacgtactttatccgtacggcggcataatggatgagattagtgaaagcgccatccctttcccccacagagctggtatcctgtacgagttgtggtatatctgctcctgggagaaacaggaggataacgaaaagcacttaaattggattaggaatatctacaatttcatgacgccctacgtttccaagaaccccaggttggcctatttgaactacagggatcttgatattggaatcaacgaccccaaaaacccaaacaactacacccaggcaaggcaatggggagagaagtacttcgggaagaacttcgacaggctagttaaggtgaaaacgctagttgatccaaataattttttcagaaacgaacagagtatccctcccttaccgcgtcataggcac

SEQ ID NO: 1192 - DNA, 1548 bp, Artificial Sequence
  Synthetic
aatccaagagaaaatttcttgaagtgtttttctcagtatatcccgaataatgcgacgaaccttaacttagtatacactcagaacaaccctctatatatgagcgttctaaattctacaatccacaacctaagatttacgtccgacacgactccgaaacccctagttatagtgacaccgtcacatgttagccatatacaggccaccatactatgttccaaaaaagttgggttacaaatacgtacccgtagcgggggacacgacagtgaggggatgagttatattagtcaggtgcctttcgtcatagtggatttaagaaatatgaggtcaattaaaatcgacgttcactcacaaactgcctgggttgaggcgggggccacattgggtgaagtatattactgggtcaatgagaagaacgagaatctttcactagcagccggttattgtcccacagtctgcgccggcggtcactttggcggcggcggatacggtcccttaatgagaaattacgggcttgccgcagacaatatcatagatgctcacttagttaatgttaacggaaaagtgttagaccgtaaaagcatgggggaggatctgttttgggcgcttagagggggaggggcagaatcatttggaataatagtggcatggaaaatcaggcttgtggctgttccaaagagtaccatgttctcagtaaagaaaataatggagatccatgagctagttaaacttgtgaataaatggcaaaacatagcctataaatatgataaggacttgctgcttatgactcatttcataaccagaaacattacggataaccaagggaagaacaaaacagccatccatacctactttagctccgttttcttgggtggtgtagacagcttagttgacctgatgaacaagagttttccggaactaggtatcaagaaggaagattgtagagaaatgtcctggattgataccataatcttttacagcggagtcgtcaattatgacactgacaacttcaacaaggaaattttattagataggagtgcgggtcaaaatggggccttcaagatcaaactagactacgttaaaaaacccattcctgaaagtgtttttgttcagattctggagaagctgtatgaagaagatattggcgcggggatgtacgtactttatccgtacggcggcataatggatgagattagtgaaagcgccatccctttcccccacagagctggtatcctgtacgagttgtggtatatctgctcctgggagaaacaggaggataacgaaaagcacttaaattggattaggaatatctacaatttcatgacgccctacgtttccaagaaccccaggttggcctatttgaactacagggatgtagatattggaatcaacgaccccaaaaacccaaacaactacacccaggcaaggatttggggagagaagtacttcgggaagaacttcgacaggctagttaaggtgaaaacgctagttgatccaaataattttttcagaaacgaacagagtatccctcccttaccgcgtcataggcac

SEQ ID NO: 1193 - DNA, 1548 bp, Artificial Sequence
  Synthetic
aatccaagagaaaatttcttgaagtgtttttctcagtatatcccgaataatgcgacgaaccttaacttagtatacactcagaacaaccctctatatatgagcgttctaaattctacaatccacaacctaagatttacgtccgacacgactccgaaacccctagttatagtgacaccgtcacatgttagccatatacaggctaccatactatgttccaaaaaagttgggttacaaatacgtacccgtagcgggggacacgacagtgaggggatgagttatattagtcaggtgcctttcgtcatagtggatttaagaaatatgaggtcaattaaaatcgacgttcactcacaaactgcctgggttgaggcgggggccacattgggtgaagtatattactgggtcaatgagaagaacgagaatctttcactagcagccggttattgtcccacagtctgcgccggcggtcactttggcggcggcggatacggtcccttaatgagaaattacgggcttgccgcagacaatatcatagatgctcacttagttaatgttaacggaaaagtgttagaccgtaaaagcatgggggaggatctgttttgggcgcttagagggggaggggcagaatcatttggaataatagtggcatggaaaatcaggcttgtggctgttccaaagagtaccatgttctcagtaaagaaaataatggagatccatgagctagttaaacttgtgaataaatggcaaaacatagcctataaatatgataaggacttgctgcttatgactcatttcataaccagaaacattacggataaccaagggaagaacaaaacagccatccatacctactttagctccgttttcttgggtggtgtagacagcttagttgacctgatgaacaagagttttccggaactaggtatcaagaaggaagattgtagagaaatgtcctggattgataccataatcttttacagcggagtcgtcaattatgacactgacaacttcaacaaggaaattttattagataggagtgcgggtcaacgcggggccttcaagatcaaactagactacgttaaaaaacccattcctgaaagtgtttttgttcagattctggagaagctgtatgaagaagatattggcgcggggatgtacgtactttatccgtacggcggcataatggatgagattagtgaaagcgccatccctttcccccacagagctggtatcctgtacgagttgtggtatatctgctcctgggagaaacaggaggataacgaaaagcacttaaattggattaggaatatctacaatttcatgacgccctacgtttccaagaaccccaggttggcctatttgaactacagggatcttgatattggaatcaacgaccccaaaaacccaaacaactacacccaggcaaggatttggggagagaagtacttcgggaagaacttcgacaggctagttaaggtgaaaacgctagttgatccaaataattttttcagaaacgaacagagtatccctcccttaccgcgtcataggcac

SEQ ID NO: 1194 - DNA, 1548 bp, Artificial Sequence
  Synthetic
aatccaagagaaaatttcttgaagtgtttttctcagtatatcccgaataatgcgacgaaccttaacttagtatacactcagaacaaccctctatatatgagcgttctaaattctacaatccacaacctaagatttacgtccgacacgactccgaaacccctagttatagtgacaccgtcacatgttagccatatacaggcaaccatactatgttccaaaaaagttgggttacaaatacgtacccgtagcgggggacacgacagtgaggggatgagttatattagtcaggtgcctttcgtcatagtggatttaagaaatatgaggtcaattaaaatcgacgttcactcacaaactgcctgggttgaggcgggggccacattgggtgaagtatattactgggtcaatgagaagaacgagaatctttcactagcagccggttattgtcccacagtctgcgccggcggtttttttggcggcggcggatacggtcccttaatgagaaattacgggcttgccgcagacaatatcatagatgctcacttagttaatgttaacggaaaagtgttagaccgtaaaagcatgggggaggatctgttttgggcgcttagagggggaggggcagaatcatttggaataatagtggcatggaaaatcaggcttgtggctgttccaaagagtaccatgttctcagtaaagaaaataatggagatccatgagctagttaaacttgtgaataaatggcaaaacatagcctataaatatgataaggacttgctgcttatgactcatttcataaccagaaacattacggataaccaagggaagaacaaaacagccatccatacctactttagctccgttttcttgggtggtgtagacagcttagttgacctgatgaacaagagttttccggaactaggtatcaagaaggaagattgtagagaaatgtcctggattgataccataatcttttacagcggagtcgtcaattatgacactgacaacttcaacaaggaaattttattagataggagtgcgggtcaaaatggggccttcaagatcaaactagactacgttaaaaaacccattcctgaaagtgtttttgttcagattctggagaagctgtatgaagaagatattggcgcggggatgtacgtactttatccgtacggcggcataatggatgagattagtgaaagcgccatccctttcccccacagagctggtatcctgtacgagttgtggtatatctgctcctgggagaaacaggaggataacgaaaagcacttaaattggattaggaatatctacaatttcatgacgccctacgtttccaagaaccccaggttggcctatttgaactacagggatcttgatattggaatcaacgaccccaaaaacccaaacaactacacccaggcaaggatttggggagagaagtacttcgggaagaacttcgacaggctagttaaggtgaaaacgctagttgatccaaataattttttcagaaacgaacagagtatccctcccttaccgcgtcataggcac

SEQ ID NO: 1195 - DNA, 1548 bp, Artificial Sequence
  Synthetic
aatccaagagaaaatttcttgaagtgtttttctcagtatatcccgaataatgcgacgaaccttaagttagtatacactcagaacaaccctctatatatgagcgttctaaattctacaatccacaacctaagatttacgtccgacacgactccgaaacccctagttatagtgacaccgtcacatgttagccatatacagggcaccatactatgttccaaaaaagttgggttacaaatacgtacccgtagcgggggacacgacagtgaggggatgagttatattagtcaggtgcctttcgtcatagtggatttaagaaatatgaggtcaattaaaatcgacgttcactcacaaactgcctgggttgaggcgggggccacattgggtgaagtatattactgggtcaatgagaagaacgagaatctttcactagcagccggttattgtcccacagtctgcgccggcggtcactttggcggcggcggatacggtcccttaatgagaaattacgggcttgccgcagacaatatcatagatgctcacttagttaatgttcatggaaaagtgttagaccgtaaaagcatgggggaggatctgttttgggcgattagagggggaggggcagaatcatttggaataatagtggcatggaaaatcaggcttgtggctgttccaaagagtaccatgttctcagtaaagaaaataatggagatccatgagctagttaaacttgtgaataaatggcaaaacatagcctataaatatgataaggacttgctgcttatgactcatttcataaccagaaacattacggataaccaagggaagaacaaaacagccatccatacctactttagctccgttttcttgggtggtgtagacagcttagttgacctgatgaacaagagttttccggaactaggtatcaagaaggaagattgtagagaactttcctggattgataccataatcttttacagcggagtcgtcaattatgacactgacaacttcaacaaggaaattttattagataggagtgcgggtcaaaatggggccttcaagatcaaactagactacgttaaaaaacccattcctgaaagtgtttttgttcagattctggagaagctgtatgaagaagatattggtgcgggtatgtacgctctttatccgtacggcggcataatggatgagattagtgaaagcgccatccctttcccccacagagctggtatcctgtacgagttgtggtatatctgctcctgggagaaacaggaggataacgaaaagcacttaaattggattaggaatatctacaatttcatgacgccctacgtttccaagaaccccaggttggcctatttgaactacagggatcttgatattggaatcaacgaccccaaaaacccaaacaactacacccaggcaaggatttggggagagaagtacttcgggaagaacttcgacaggctagttaaggtgaaaacgctagttgatccaaataattttttcagaaacgaacagagtatccctcccttaccgcgtcataggcac

SEQ ID NO: 1196 - DNA, 1548 bp, Artificial Sequence
  Synthetic
aatccaagagaaaatttcttgaagtgtttttctcagtatatcccgaataatgcgacgaaccttaagttagtatacactcagaacaaccctctatatatgagcgttctaaattctacaatccacaacctaagatttacgtccgacacgactccgaaacccctagttatagtgacaccgtcacatgttagccatatacaggcaaccatactatgttccaaaaaagttgggttacaaatacgtacccgtagcgggggacacgacagtgaggggatgagttatattagtcaggtgcctttcgtcatagtggatttaagaaatatgaggtcaattaaaatcgacgttcactcacaaactgcctgggttgaggcgggggccacattgggtgaagtatattactgggtcaatgagaagaacgagaatctttcactagcagccggttattgtcccacagtctgcgccggcggtcactttggcggcggcggatacggtcccttaatgagaaattacgggcttgccgcagacaatatcatagatgctcacttagttaatgttcatggaaaagtgttagaccgtaaaagcatgggggaggatctgttttgggcgcttagagggggaggggcagaatcatttggaataatagtggcatggaaaatcaggcttgtggctgttccaaagagtaccatgttctcagtaaagaaaataatggagatccatgagctagttaaacttgtgaataaatggcaaaacatagcctataaatatgataaggacttgctgcttatgactcatttcataaccagaaacattacggataaccaagggaagaacaaaacagccatccatacctactttagctccgttttcttgggtggtgtagacagcttagttgacctgatgaacaagagttttccggaactaggtatcaagaaggaagattgtagagaactttcctggattgataccataatcttttacagcggagtcgtcaattatgacactgacaacttcaacaaggaaattttattagataggagtgcgggtcaaaatggggccttcaagatcaaactagactacgttaaaaaacccattcctgaaagtgtttttgttcagattctggagaagctgtatgaagaagatattggcgcgggtatgtacgctctttatccgtacggcggcataatggatgagattagtgaaagcgccatccctttcccccacagagctggtatcctgtacgagttgtggtatatctgctcctgggagaaacaggaggataacgaaaagcacttaaattggattaggaatatctacaatttcatgacgccctacgtttccaagaaccccaggttggcctatttgaactacagggatcttgatattggaatcaacgaccccaaaaacccaaacaactacacccaggcaaggatttggggagagaagtacttcgggaagaacttcgacaggctagttaaggtgaaaacgctagttgatccaaataattttttcagaaacgaacagagtatccctcccttaccgcgtcataggcac

SEQ ID NO: 1197 - DNA, 1548 bp, Artificial Sequence
  Synthetic
aatccaagagaaaatttcttgaagtgtttttctcagtatatcccgaataatgcgacgaaccttaacttagtatacactcagaacaaccctctatatatgagcgttctaaattctacaatccacaacctaagatttacgtccgacacgactccgaaacccctagttatagtgacaccgtcacatgttagccatatacagggcaccatactatgttccaaaaaagttgggttacaaatacgtacccgtagcgggggacacgacagtgaggggatgagttatattagtcaggtgcctttcgtcatagtggatttaagaaatatgaggtcaattaaaatcgacgttcactcacaaactgcctgggttgaggcgggggccacattgggtgaagtatattactgggtcaatgagaagaacgagaatctttcactagcagccggttattgtcccacagtctgcgccggcggtcactttggcggcggcggatacggtcccttaatgagaaattacgggcttgccgcagacaatatcatagatgctcacttagttaatgttcatggaaaagtgttagaccgtaaaagcatgggggaggatctgttttgggcgcttagagggggaggggcagaatcatttggaataatagtggcatggaaaatcaggcttgtggctgttccaaagagtaccatgttctcagtaaagaaaataatggagatccatgagctagttaaacttgtgaataaatggcaaaacatagcctataaatatgataaggacttgctgcttatgactcatttcataaccagaaacattacggataaccaagggaagaacaaaacagccatccatacctactttagctccgttttcttgggtggtgtagacagcttagttgacctgatgaacaagagttttccggaactaggtatcaagaaggaagattgtagagaaatgtcctggattgataccataatcttttacagcggagtcgtcaattatgacactgacaacttcaacaaggaaattttattagataggagtgcgggtcaaaatggggccttcaagatcaaactagactacgttaaaaaacccattcctgaaagtgtttttgttcagattctggagaagctgtatgaagaagatattggtgcgggaatgtacgctctttatccgtacggcggcataatggatgagattagtgaaagcgccatccctttcccccacagagctggtatcctgtacgagttgtggtatatctgctcctgggagaaacaggaggataacgaaaagcacttaaattggattaggaatatctacaatttcatgacgccctacgtttccaagaaccccaggttggcctatttgaactacagggatcttgatattggaatcaacgaccccaaaaacccaaacaactacacccaggcaaggatttggggagagaagtacttcgggaagaacttcgacaggctagttaaggtgaaaacgctagttgatccagataattttttcagaaacgaacagagtatccctcccttaccgcgtcataggcac

SEQ ID NO: 1198 - DNA, 1548 bp, Artificial Sequence
  Synthetic
aatccaagagaaaatttcttgaagtgtttttctcagtatatcccgaataatgcgacgaaccttaagttagtatacactcagaacaaccctctatatatgagcgttctaaattctacaatccacaacctaagatttacgtccgacacgactccgaaacccctagttatagtgacaccgtcacatgttagccatatacagggcaccatactatgttccaaaaaagttgggttacaaatacgtacccgtagcgggggacacgacagtgaggggatgagttatattagtcaggtgcctttcgtcatagtggatttaagaaatatgaggtcaattaaaatcgacgttcactcacaaactgcctgggttgaggcgggggccacattgggtgaagtatattactgggtcaatgagaagaacgagaatctttcactagcagccggttattgtcccacagtctgcgccggcggtcactttggcggcggcggatacggtcccttaatgagaaattacgggcttgccgcagacaatatcatagatgctcacttagttaatgttcatggaaaagtgttagaccgtaaaagcatgggggaggatctgttttgggcgcttagagggggaggggcagaatcatttggaataatagtggcatggaaaatcaggcttgtggctgttccaaagagtaccatgttctcagtaaagaaaataatggagatccatgagctagttaaacttgtgaataaatggcaaaacatagcctataaatatgataaggacttgctgcttatgactcatttcataaccagaaacattacggataaccaagggaagaacaaaacagccatccatacctactttagctccgttttcttgggtggtgtagacagcttagttgacctgatgaacaagagttttccggaactaggtatcaagaaggaagattgtagagaactttcctggattgataccataatcttttacagcggagtcgtcaattatgacactgacaacttcaacaaggaaattttattagataggagtgcgggtcaaaatggggccttcaagatcaaactagactacgttaaaaaacccattcctgaaagtgtttttgttcagattctggagaagctgtatgaagaagatattggtgcgggtatgtacgctctttatccgtacggcggcataatggatgagattagtgaaagcgccatccctttcccccacagagctggtatcctgtacgagttgtggtatatctgctcctgggagaaacaggaggataacgaaaagcacttaaattggattaggaatatctacaatttcatgacgccctacgtttccaagaaccccaggttgacttatttgaactacagggatcttgatattggaatcaacgaccccaaaaacccaaacaactacacccaggcaaggatttggggagagaagtacttcgggaagaacttcgacaggctagttaaggtgaaaacgctagttgatccaaataattttttcagaaacgaacagagtatccctcccttaccgcgtcataggcac

SEQ ID NO: 1199 - DNA, 1548 bp, Artificial Sequence
  Synthetic
aatccaagagaaaatttcttgaagtgtttttctcagtatatcccgaataatgcgacgaaccttaagttagtatacactcagaacaaccctctatatatgagcgttctaaattctacaatccacaacctaagatttacgtccgacacgactccgaaacccctagttatagtgacaccgtcacatgttagccatatacagggcaccatactatgttccaaaaaagttgggttacaaatacgtacccgtagcgggggacacgacgcagaggggatgagttatattagtcaggtgcctttcgtcatagtggatttaagaaatatgaggtcaattaaaatcgacgttcactcacaaactgcctgggttgaggcgggggccacattgggtgaagtatattactgggtcaatgagaagaacgagaatctttcactagcagccggttattgtcccacagtctgcgccggcggtcactttggcggcggcggatacggtcccttaatgagaaattacgggcttgccgcagacaatatcatagatgctcacttagttaatgttcatggaaaagtgttagaccgtaaaagcatgggggaggatctgttttgggcgcttagagggggaggggcagaatcatttggaataatagtggcatggaaaatcaggcttgtggctgttccaaagagtaccatgttctcagtaaagaaaataatggagatccatgagctagttaaacttgtgaataaatggcaaaacatagcctataaatatgataaggacttgctgcttatgactcatttcataaccagaaacattacggataaccaagggaagaacaaaacagccatccatacctactttagctccgttttcttgggtggtgtagacagcttagttgacctgatgaacaagagttttccggaactaggtatcaagaaggaagattgtagagaactttcctggattgataccataatcttttacagcggagtcgtcaattatgacactgacaacttcaacaaggaaattttattagataggagtgcgggtcaaaatggggccttcaagatcaaactagactacgttaaaaaacccattcctgaaagtgtttttgttcagattctggagaagctgtatgaagaagatattggagcgggtatgtacgctctttatccgtacggcggcataatggatgagattagtgaaagcgccatccctttcccccacagagctggtatcctgtacgagttgtggtatatctgctcctgggagaaacaggaggataacgaaaagcacttaaattggattaggaatatctacaatttcatgacgccctacgtttccaagaaccccaggttggcctatttgaactacagggatcttgatattggaatcaacgaccccaaaaacccaaacaactacacccaggcaaggatttggggagagaagtacttcgggaagaacttcgacaggctagttaaggtgaaaacgctagttgatccaaataattttttcagaaacgaacagagtatccctcccttaccgcgtcataggcac

SEQ ID NO: 1200 - DNA, 1548 bp, Artificial Sequence
  Synthetic
aatccaagagaaaatttcttgaagtgtttttctcagtatatcccgaataatgcgacgaaccttaacttagtatacactcagaacaaccctctatatatgagcgttctaaattctacaatccacaacctaagatttacgtccgacacgactccgaaacccctagttatagtgacaccgtcacatgttagccatatacagggcaccatactatgttccaaaaaagttgggttacaaatacgtacccgtagcgggggacacgacgcagaggggatgagttatattagtcaggtgcctttcgtcatagtggatttaagaaatatgaggtcaattaaaatcgacgttcactcacaaactgcctgggttgaggcgggggccacattgggtgaagtatattactgggtcaatgagaagaacgagaatctttcactagcagccggttattgtcccacagtctgcgccggcggtcactttggcggcggcggatacggtcccttaatgagaaattacgggcttgccgcagacaatatcatagatgctcacttagttaatgttcatggaaaagtgttagaccgtaaaagcatgggggaggatctgttttgggcgcttagagggggaggggcagaatcatttggaataatagtggcatggaaaatcaggcttgtggctgttccaaagagtaccatgttctcagtaaagaaaataatggagatccatgagctagttaaacttgtgaataaatggcaaaacatagcctataaatatgataaggacttgctgcttatgactcatttcataaccagaaacattacggataaccaagggaagaacaaaacagccatccatacctactttagctccgttttcttgggtggtgtagacagcttagttgacctgatgaacaagagttttccggaactaggtatcaagaaggaagattgtagagaaatgtcctggattgataccataatcttttacagcggagtcgtcaattatgacactgacaacttcaacaaggaaattttattagataggagtgcgggtcaaaatggggccttcaagatcaaactagactacgttaaaaaacccattcctgaaagtgtttttgttcagattctggagaagctgtatgaagaagatattggtgcgggtatgtacgctctttatccgtacggcggcataatggatgagattagtgaaagcgccatccctttcccccacagagctggtatcctgtacgagttgtggtatatctgctcctgggagaaacaggaggataacgaaaagcacttaaattggattaggaatatctacaatttcatgacgccctacgtttccaagaaccccaggttggcctatttgaactacagggatcttgatattggaatcaacgaccccaaaaacccaaacaactacacccaggcaaggatttggggagagaagtacttcgggaagaacttcgacaggctagttaaggtgaaaacgctagttgatccagataattttttcagaaacgaacagagtatccctcccttaccgcgtcataggcac

SEQ ID NO: 1201 - DNA, 1548 bp, Artificial Sequence
  Synthetic
aatccaagagaaaatttcttgaagtgtttttctcagtatatcccgaataatgcgacgaaccttaacttagtatacactcagaacaaccctctatatatgagcgttctaaattctacaatccacaacctaagatttacgtccgacacgactccgaaacccctagttatagtgacaccgtcacatgttagccatatacagggcaccatactatgttccaaaaaagttgggttacaaatacgtacccgtagcgggggacacgacagtgaggggatgagttatattagtcaggtgcctttcgtcatagtggatttaagaaatatgaggtcaattaaaatcgacgttcactcacaaactgcctgggttgaggcgggggccacattgggtgaagtatattactgggtcaatgagaagaacgagaatctttcactagcagccggttattgtcccacagtctgcgccggcggtcactttggcggcggcggatacggtcccttaatgagaaattacgggcttgccgcagacaatatcatagatgctcacttagttaatgttaacggaaaagtgttagaccgtaaaagcatgggggaggatctgttttgggcgcttagagggggaggggcagaatcatttggaataatagtggcatggaaaatcaggcttgtggctgttccaaagagtaccatgttctcagtaaagaaaataatggagatccatgagctagttaaacttgtgaataaatggcaaaacatagcctataaatatgataaggacttgctgcttatgactcatttcataaccagaaacattacggataaccaagggaagaacaaaacagccatccatacctactttagctccgttttcttgggtggtgtagacagcttagttgacctgatgaacaagagttttccggaactaggtatcaagaaggaagattgtagagaaatgtcctggattgataccataatcttttacagcggagtcgtcaattatgacactgacaacttcaacaaggaaattttattagataggagtgcgggtcaaaatggggccttcaagatcaaactagactacgttaaaaaacccattcctgaaagtgtttttgttcagattctggagaagctgtatgaagaagatattggtgcgggtatgtacgctctttatccgtacggcggcataatggatgagattagtgaaagcgccatccctttcccccacagagctggtatcctgtacgagttgtggtatatctgctcctgggagaaacaggaggataacgaaaagcacttaaattggattaggaatatctacaatttcatgacgccctacgtttccaagaaccccaggttggcctatttgaactacagggatcttgatattggaatcaacgaccccaaaaacccaaacaactacacccaggcaaggatttggggagagaagtacttcgggaagaacttcgacaggctagttaaggtgaaaacgctagttgatccagataattttttcagaaacgaacagagtatccctcccttaccgcgtcataggcac

SEQ ID NO: 1202 - DNA, 1548 bp, Artificial Sequence
  Synthetic
aatccaagagaaaatttcttgaagtgtttttctcagtatatcccgaataatgcgacgaaccttaagttagtatacactcagaacaaccctctatatatgagcgttctaaattctacaatccacaacctaagatttacgtccgacacgactccgaaacccctagttatagtgacaccgtcacatgttagccatatacagggcaccatactatgttccaaaaaagttgggttacaaatacgtacccgtagcgggggacacgacagtgaggggatgagttatattagtcaggtgcctttcgtcatagtggatttaagaaatatgaggtcaattaaaatcgacgttcactcacaaactgcctgggttgaggcgggggccacattgggtgaagtatattactgggtcaatgagaagaacgagaatctttcactagcagccggttattgtcccacagtctgcgccggcggtcactttggcggcggcggatacggtcccttaatgagaaattacgggcttgccgcagacaatatcatagatgctcacttagttaatgttcatggaaaactgttagaccgtaaaagcatgggggaggatctgttttgggcgcttagagggggaggggcagaatcatttggaataatagtggcatggaaaatcaggcttgtggctgttccaaagagtaccatgttctcagtaaagaaaataatggagatccatgagctagttaaacttgtgaataaatggcaaaacatagcctataaatatgataaggacttgctgcttatgactcatttcataaccagaaacattacggataaccaagggaagaacaaaacagccatccatacctactttagctccgttttcttgggtggtgtagacagcttagttgacctgatgaacaagagttttccggaactaggtatcaagaaggaagattgtagagaactttcctggattgataccataatcttttacagcggagtcgtcaattatgacactgacaacttcaacaaggaaattttattagataggagtgcgggtcaaaatggggccttcaagatcaaactagactacgttaaaaaacccattcctgaaagtgtttttgttcagattctggagaagctgtatgaagaagatattggtgcgggtatgtacgctctttatccgtacggcggcataatggatgagattagtgaaagcgccatccctttcccccacagagctggtatcctgtacgagttgtggtatatctgctcctgggagaaacaggaggataacgaaaagcacttaaattggattaggaatatctacaatttcatgacgccctacgtttccaagaaccccaggttggcctatttgaactacagggatcttgatattggaatcaacgaccccaaaaacccaaacaactacacccaggcaaggatttggggagagaagtacttcgggaagaacttcgacaggctagttaaggtgaaaacgctagttgatccaaataattttttcagaaacgaacagagtatccctcccttaccgcgtcataggcac

SEQ ID NO: 1203 - DNA, 1548 bp, Artificial Sequence
  Synthetic
aatccaagagaaaatttcttgaagtgtttttctcagtatatcccgaataatgcgacgaaccttaagttagtatacactcagaacaaccctctatatatgagcgttctaaattctacaatccacaacctaagatttacgtccgacacgactccgaaacccctagttatagtgacaccgtcacatgttagccatatacagggcaccatactatgttccaaaaaagttgggttacaaatacgtacccgtagcgggggacacgacagtgaggggatgagttatattagtcaggtgcctttcgtcatagtggatttaagaaatatgaggtcaattaaaatcgacgttcactcacaaactgcctgggttgaggcgggggccacattgggtgaagtatattactgggtcaatgagaagaacgagaatctttcactagcagccggttattgtcccacagtctgcgccggcggtcactttggcggcggcggatacggtcccttaatgagaaattacgggcttgccgcagacaatatcatagatgctcacttagttaatgttcatggaaaagtgttagaccgtaaaagcatgggggaggatctgttttgggcgcttagagggggaggggcagaatcatttggaataatagtggcatggaaaatcaggcttgtggctgttccaaagagtaccatgttctcagtaaagaaaataatggagatccatgagctagttaaacttgtgaataaatggcaaaacatagcctataaatatgataaggacttgctgcttatgactcatttcataaccagaaacattacggataaccaagggaagaacaaaacagccatccatacctactttagctccgttttcttgggtggtgtagacagcttagttgacctgatgaacaagagttttccggaactaggtatcaagaaggaagattgtagagaactttcctggattgataccataatcttttacagcggagtcgtcaattatgacactgacaacttcaacaaggaaattttattagataggagtgcgggtggtaatggggccttcaagatcaaactagactacgttaaaaaacccattcctgaaagtgtttttgttcagattctggagaagctgtatgaagaagatattggtgcgggtatgtacgctctttatccgtacggcggcataatggatgagattagtgaaagcgccatccctttcccccacagagctggtatcctgtacgagttgtggtatatctgctcctgggagaaacaggaggataacgaaaagcacttaaattggattaggaatatctacaatttcatgacgccctacgtttccaagaaccccaggttggcctatttgaactacagggatcttgatattggaatcaacgaccccaaaaacccaaacaactacacccaggcaaggatttggggagagaagtacttcgggaagaacttcgacaggctagttaaggtgaaaacgctagttgatccaaataattttttcagaaacgaacagagtatccctcccttaccgcgtcataggcac

SEQ ID NO: 1204 - DNA, 1548 bp, Artificial Sequence
  Synthetic
aatccaagagaaaatttcttgaagtgtttttctcagtatatcccgaataatgcgacgaaccttaagttagtatacactcagaacaaccctctatatatgagcgttctaaattctacaatccacaacctaagatttacgtccgacacgactccgaaacccctagttatagtgacaccgtcacatgttagccatatacagggcaccatactatgtgcaaaaaaagttgggttacaaatacgtacccgtagcgggggacacgacagtgaggggatgagttatattagtcaggtgcctttcgtcatagtggatttaagaaatatgaggtcaattaaaatcgacgttcactcacaaactgcctgggttgaggcgggggccacattgggtgaagtatattactgggtcaatgagaagaacgagaatctttcactagcagccggttattgtcccacagtctgcgccggcggtcactttggcggcggcggatacggtcccttaatgagaaattacgggcttgccgcagacaatatcatagatgctcacttagttaatgttcatggaaaagtgttagaccgtaaaagcatgggggaggatctgttttgggcgcttagagggggaggggcagaatcatttggaataatagtggcatggaaaatcaggcttgtggctgttccaaagagtaccatgttctcagtaaagaaaataatggagatccatgagctagttaaacttgtgaataaatggcaaaacatagcctataaatatgataaggacttgctgcttatgactcatttcataaccagaaacattacggataaccaagggaagaacaaaacagccatccatacctactttagctccgttttcttgggtggtgtagacagcttagttgacctgatgaacaagagttttccggaactaggtatcaagaaggaagattgtagagaactttcctggattgataccataatcttttacagcggagtcgtcaattatgacactgacaacttcaacaaggaaattttattagataggagtgcgggtcaaaatggggccttcaagatcaaactagactacgttaaaaaacccattcctgaaagtgtttttgttcagattctggagaagctgtatgaagaagatattggcgcgggtatgtacgctctttatccgtacggcggcataatggatgagattagtgaaagcgccatccctttcccccacagagctggtatcctgtacgagttgtggtatatctgctcctgggagaaacaggaggataacgaaaagcacttaaattggattaggaatatctacaatttcatgacgccctacgtttccaagaaccccaggttggcctatttgaactacagggatcttgatattggaatcaacgaccccaaaaacccaaacaactacacccaggcaaggatttggggagagaagtacttcgggaagaacttcgacaggctagttaaggtgaaaacgctagttgatccaaataattttttcagaaacgaacagagtatccctcccttaccgcgtcataggcac

SEQ ID NO: 1205 - DNA, 1548 bp, Artificial Sequence
  Synthetic
aatccaagagaaaatttcttgaagtgtttttctcagtatatcccgaataatgcgacgaaccttaagttagtatacactcagaacaaccctctatatatgagcgttctaaattctacaatccacaacctaagatttacgtccgacacgactccgaaacccctagttatagtgacaccgtcacatgttagccatatacagggcaccatactatgttccaaaaaagttgggttacaaatacgtacccgtagcgggggacacgacagtgaggggatgagttatattagtcaggtgcctttcgtcatagtggatttaagaaatatgaggtcaattaaaatcgacgttcactcacaaactgcctgggttgaggcgggggccacattgggtgaagtatattactgggtcaatgagaagaacgagaatctttcactagcagccggttattgtcccacagtctgcgccggcggtcactttggcggcggcggatacggtcccttaatgagaaattacgggcttgccgcagacaatatcatagatgctcacttagttaatgttcatggaaaagtgttagaccgtaaaagcatgggggaggatctgttttgggcgcttagagggggaggggcagaatcatttggaataatagtggcatggaaaatcaggcttgtggctgttccaaagagtaccatgttctcagtaaagaaaataatggagatccatgagctagttaaacttgtgaataaatggcaaaacatagcctataaatatgataaggacttgctgcttatgactcatttcataaccagaaacattacggataaccaagggaagaacaaaacagccatccatacctactttagctccgttttcttgggtggtgtagacagcttagttgacctgatgaacaagagttttccggaactaggtatcaagaaggaagattgtagagaactttcctggattgataccataatcttttacagcggagtcgtcaattatgacactgacaacttcaacaaggaaattttattagataggagtgcgggtccaaatggggccttcaagatcaaactagactacgttaaaaaacccattcctgaaagtgtttttgttcagattctggagaagctgtatgaagaagatattggtgcgggtatgtacgctctttatccgtacggcggcataatggatgagattagtgaaagcgccatccctttcccccacagagctggtatcctgtacgagttgtggtatatctgctcctgggagaaacaggaggataacgaaaagcacttaaattggattaggaatatctacaatttcatgacgccctacgtttccaagaaccccaggttggcctatttgaactacagggatcttgatattggaatcaacgaccccaaaaacccaaacaactacacccaggcaaggatttggggagagaagtacttcgggaagaacttcgacaggctagttaaggtgaaaacgctagttgatccaaataattttttcagaaacgaacagagtatccctcccttaccgcgtcataggcac

SEQ ID NO: 1206 - DNA, 1548 bp, Artificial Sequence
  Synthetic
aatccaagagaaaatttcttgaagtgtttttctcagtatatcccgaataatgcgacgaaccttaagttagtatacactcagaacaaccctctatatatgagcgttctaaattctacaatccacaacctaagatttacgtccgacacgactccgaaacccctagttatagtgacaccgtcacatgttagccatatacagggcaccatactatgttccaaaaaagttgggttacaaatacgtacccgtagcgggggacacgacagtgaggggatgagttatattagtcaggtgcctttcgtcatagtggatttaagaaatatgaggtcaattaaaatcgacgttcactcacaaactgcctgggttgaggcgggggccacattgggtgaagtatattactgggtcaatgagaagaacgagaatctttcactagcagccggttattgtcccacagtctgcgccggcggtcactttggcggcggcggatacggtcccttaatgagaaattacgggcttgccgcagacaatatcatagatgctcacttagttaatgttcatggaaaagtgttagaccgtaaaagcatgggggaggatctgttttgggcgcttagagggggaggggcagaatcatttggaataatagtggcatggaaaatcaggcttgtggctgttccaaagagtaccatgttctcagtaaagaaaataatggagatccatgagctagttaaacttgtgaataaatggcaaaacatagcctataaatatgataaggacttgctgcttatgactcatttcataaccagaaacattacggataaccaagggaagaacaaaacagccatccatacctactttagctccgttttcttgggtggtgtagacagcttagttgacctgatgaacaagagttttccggaactaggtatcaagaaggaagattgtagagaactttcctggattgataccataatcttttacagcggagtcgtcaattatgacactgacaacttcaacaaggaaattttattagataggagtgcgggtcaaaatggggccttcaagatcaaactagactacgttaaaaaacccattcctgaaagtgtttttgttcagattctggagaagctgtatgaagaagatattggtgcgggtatgtacgctctttatccgtacggcggcataatggatgagattagtgaaagcgccatccctttcccccacagagctggtatcctgtacgagttgtggtatatctgctcctgggagaaacagacagataacgaaaagcacttaaattggattaggaatatctacaatttcatgacgccctacgtttccaagaaccccaggttggcctatttgaactacagggatcttgatattggaatcaacgaccccaaaaacccaaacaactacacccaggcaaggatttggggagagaagtacttcgggaagaacttcgacaggctagttaaggtgaaaacgctagttgatccaaataattttttcagaaacgaacagagtatccctcccttaccgcgtcataggcac

SEQ ID NO: 1207 - DNA, 1548 bp, Artificial Sequence
  Synthetic
aatccaagagaaaatttcttgaagtgtttttctcagtatatcccgaataatgcgacgaaccttaagttagtatacactcagaacaaccctctatatatgagcgttctaaattctacaatccacaacctaagatttacgtccgacacgactccgaaacccctagttatagtgacaccgtcacatgttagccatatacagggcaccatactatgttccaaaaaagttgggttacaaatacgtacccgtagcgggggacacgacagtgaggggatgagttatattagtcaggtgcctttcgtcatagtggatttaagaaatatgaggtcaattaaaatcgacgttcactcacaaactgcctgggttgaggcgggggccacattgggtgaagtatattactgggtcaatgagaagaacgagaatctttcactagcagccggttattgtcccacagtctgcgccggcggtcactttggcggcggcggatacggtcccttaatgagaaattacgggcttgccgcagacaatatcatagatgctcacttagttaatgttcatggaaaagtgttagaccgtaaaagcatgggggaggatctgttttgggcgcttagagggggaggggcagaatcatttggaataatagtggcatggaaaatcaggcttgtggctgttccaaagagtaccatgttctcagtaaagaaaataatggagatccatgagctagttaaacttgtgaataaatggcaaaacatagcctataaatatgataaggacttgctgcttatgactcatttcataaccagaaacattacggataaccaagggaagaacaaaacagccatccatacctactttagctccgttttcttgggtggtgtagacagcttagttgacctgatgaacaagagttttccggaactaggtatcaagaaggaagattgtagagaactttcctggattgataccataatcttttacagcggagtcgtcaattatgacactgacaacttcaacaaggaaattttattagataggagtgcgggtactaatggggccttcaagatcaaactagactacgttaaaaaacccattcctgaaagtgtttttgttcagattctggagaagctgtatgaagaagatattggtgcgggtatgtacgctctttatccgtacggcggcataatggatgagattagtgaaagcgccatccctttcccccacagagctggtatcctgtacgagttgtggtatatctgctcctgggagaaacaggaggataacgaaaagcacttaaattggattaggaatatctacaatttcatgacgccctacgtttccaagaaccccaggttggcctatttgaactacagggatcttgatattggaatcaacgaccccaaaaacccaaacaactacacccaggcaaggatttggggagagaagtacttcgggaagaacttcgacaggctagttaaggtgaaaacgctagttgatccaaataattttttcagaaacgaacagagtatccctcccttaccgcgtcataggcac

SEQ ID NO: 1208 - DNA, 1548 bp, Artificial Sequence
  Synthetic
aatccaagagaaaatttcttgaagtgtttttctcagtatatcccgaataatgcgacgaaccttaagttagtatacactcagaacaaccctctatatatgagcgttctaaattctacaatccacaacctaagatttacgtccgacacgactccgaaacccctagttatagtgacaccgtcacatgttagccatatacagggcaccatactatgttccaaaaaagttgggttacaaatacgtacccgtagcgggggacacgacagtgaggggatgagttatattagtcaggtgcctttcgtcatagtggatttaagaaatatgaggtcaattaaaatcgacgttcactcacaaactgcctgggttgaggcgggggccacattgggtgaagtatattactgggtcaatgagaagaacgagaatctttcactagcagccggttattgtcccacagtctgcgccggcggtcactttggcggcggcggatacggtcccttaatgagaaattacgggcttgccgcagacaatatcatagatgctcacttagttaatgttcatggaaaagtgttagaccgtaaaagcatgggggaggatctgttttgggcgcttagagggggaggggcagaatcatttggaataatagtggcatggaaaatcaggcttgtggctgttccaaagagtaccatgttctcagtaaagaaaataatggagatccatgagctagttaaacttgtgaataaatggcaaaacatagcctataaatatgataaggacttgctgcttatgactcatttcataaccagaaacattacggataaccaagggaagaacaaaacagccatccatacctactttagctccgttttcttgggtggtgtagacagcttagttgacctgatgaacaagagttttccggaactaggtatcaagaaggaagattgtagagaactttcctggattgataccataatcttttacagcggagtcgtcaattatgacactgacaacttcaacaaggaaattttattagataggagtgcgggtcaaaatggggccttcaagatcaaactagactacgttaaaaaacccattcctgaaagtgtttttgttcagattctggagaagctgtatgaagaagatattggtgcgggtatgtacgctctttatccgtacggcggcataatggatgagattagtgaaagcgccatccctttcccccacagagctggtatcctgtacgagttgtggtatgcatgctcctgggagaaacaggaggataacgaaaagcacttaaattggattaggaatatctacaatttcatgacgccctacgtttccaagaaccccaggttggcctatttgaactacagggatcttgatattggaatcaacgaccccaaaaacccaaacaactacacccaggcaaggatttggggagagaagtacttcgggaagaacttcgacaggctagttaaggtgaaaacgctagttgatccaaataattttttcagaaacgaacagagtatccctcccttaccgcgtcataggcac

SEQ ID NO: 1209 - DNA, 1548 bp, Artificial Sequence
  Synthetic
aatccaagagaaaatttcttgaagtgtttttctcagtatatcccgaataatgcgacgaaccttaacttagtatacactcagaacaaccctctatatatgagcgttctaaattctacaatccacaacctaagatttacgtccgacacgactccgaaacccctagttatagtgacaccgtcacatgttagccatatacagggcaccatactatgttccaaaaaagttgggttacaaatacgtacccgtagcgggggacacgacagtgaggggatgagttatattagtcaggtgcctttcgtcatagtggatttaagaaatatgaggtcaattaaaatcgacgttcactcacaaactgcctgggttgaggcgggggccacattgggtgaagtatattactgggtcaatgagaagaacgagaatctttcactagcagccggttattgtcccacagtctgcgccggcggtcactttggcggcggcggatacggtcccttaatgagaaattacgggcttgccgcagacaatatcatagatgctcacttagttaatgttcatggaaaagtgttagaccgtaaaagcatgggggaggatctgttttgggcgcttagagggggaggggcagaatcatttggaataatagtggcatggaaaatcaggcttgtggctgttccaaagagtaccatgttctcagtaaagaaaataatggagatccatgagctagttaaacttgtgaataaatggcaaaacatagcctataaatatgataaggacttgctgcttatgactcatttcataaccagaaacattacggataaccaagggaagaacaaaacagccatccatacctactttagctccgttttcttgggtggtgtagacagcttagttgacctgatgaacaagagttttccggaactaggtatcaagaaggaagattgtagagaaatgtcctggattgataccataatcttttacagcggagtcgtcaattatgacactgacaacttcaacaaggaaattttattagataggagtgcgggtcaaaatggggccttcaagatcaaactagactacgttaaaaaacccattcctgaaagtgtttttgttcagattctggagaagctgtatgaagaagatattggtgcgggtatgtacgctctttatccgtacggcggcataatggatgagattagtgaaagcgccatccctttcccccacagagctggtatcctgtacgagttgtggtatatctgctcctgggagaaacaggaggataacgaaaagcacttaaattggattaggaatatctacaatttcatgacgccctacgtttccaagaaccccaggttggcctatttgaactacagggatcttgatattggaatcaacgaccccaaaaacccaaacaactacacccaggcaaggatttggggagagaagtacttcgggaagaacttcgacaggctagttaaggtgaaaacgctagttgatccaaataattttttcagaaacgaacagagtatccctcccttaccgcgtcataggcac

SEQ ID NO: 1210 - protein, 539 aa, Artificial Sequence
  Synthetic
MKFISTFLTFILAAVSVTANPRENFLKCFSQYIPNNATNLNLVYTQNNPLYMSVLNSTIHNLRFTSDTTPKPLVIVTPSHVSHIQGTILCSKKVGLQIRTRSGGHDSEGMSYISQVPFVIVDLRNMRSIKIDVHSQTAWVEAGATLGEVYYWVNEKNENLSLAAGYCPTVCAGGHFGGGGYGPLMRNYGLAADNIIDAHLVNVHGKVLDRKSMGEDLFWALRGGGAESFGIIVAWKIRLVAVPKSTMFSVKKIMEIHELVKLVNKWQNIAYKYDKDLLLMTHFITRNITDNQGKNKTAIHTYFSSVFLGGVDSLVDLMNKSFPELGIKKTDCRQLSWIDTIIFYSGVVNYDTDNFNKEILLDRSAGQNGAFKIKLDYVKKPIPESVFVQILEKLYEEDIGAGMYALYPYGGIMDEISESAIPFPHRAGILYELWYICSWEKQEDNEKHLNWIRNIYNFMTPYVSKNPRLAYLNYRDLDIGINDPKNPNNYTQARIWGEKYFGKNFDRLVKVKTLVDPNNFFRNEQSIPPLPRHRHHDEL

SEQ ID NO: 1211 - protein, 539 aa, Artificial Sequence
  Synthetic
MKFISTFLTFILAAVSVTANPRENFLKCFSQYIPNNATNLKLVYTQNNPLYMSVLNSTIHNLRFTSDTTPKPLVIVTPSHVSHIQGTILCSKKVGLQIRTRSGGHDAEGMSYISQVPFVIVDLRNMRSIKIDVHSQTAWVEAGATLGEVYYWVNEKNENLSLAAGYCPTVCAGGHFGGGGYGPLMRNYGLAADNIIDAHLVNVHGKVLDRKSMGEDLFWALRGGGAESFGIIVAWKIRLVAVPKSTMFSVKKIMEIHELVKLVNKWQNIAYKYDKDLLLMTHFITRNITDNQGKNKTAIHTYFSSVFLGGVDSLVDLMNKSFPELGIKKTDCRQLSWIDTIIFYSGVVNYDTDNFNKEILLDRSAGQNGAFKIKLDYVKKPIPESVFVQILEKLYEEDIGAGMYALYPYGGIMDEISESAIPFPHRAGILYELWYICSWEKQEDNEKHLNWIRNIYNFMTPYVSKNPRLAYLNYRDLDIGINDPKNPNNYTQARIWGEKYFGKNFDRLVKVKTLVDPNNFFRNEQSIPPLPRHRHHDEL

SEQ ID NO: 1212 - protein, 540 aa, Artificial Sequence
  Synthetic
MKFISTFLTFILAAVSVTANPQENFLKCFSQYIPNNATNAKLVYTQNDPLYMSVLNSTIQNLRFTSDTTPKPLVIVTPSNVSHIQGTILCSKKVGLQIRTRSGGHDAEGMSYISQVPFVIVDLRNMRSIKIDVHSQTAWVEAGATLGEVYYWINEKNENLSFPAGYCPTVGAGGHFSGGGYGALMRNYGLAADNIIDAHLVNVDGKVLDRKSMGEDLFWAIRGGGGESFGIIVAWKIRLVAVPSKSTMFSVKKNMEIHELVKLVNKWQNIAYKYDKDLLLMTHFITRNITDNQGKNKTTIHSYFSSIFLGGVDSLVDLMNKSFPELGIKKTDCKQLSWIDTIIFYSGVVNYDTTNFKKEILLDRSAGQNAAFKIKLDYVKKPIPETVMVKILEKLYEEDVGVGMYVLYPYGGIMDEISESAIPFPHRAGIMYELWYIASWEKQEDNEKHLNWIRNVYNFMTPYVSQNPRLAYLNYRDLDLGKNNPKSPNNYTQARIWGEKYFGKNFNRLVKVKTKVDPNNFFRNEQSIPPLPRHRHHDEL

SEQ ID NO: 1213 - protein, 542 aa, Artificial Sequence
  Synthetic
MKFISTFLTFILAAVSVTANPQENFLKCFSQYIPNNATKSNAKLVYTQNDPLYMSVLNSTIQNLRFTSDTTPKPLVIVTPSNVSHIQGTILCSKKVGLQIRTRSGGHDAEGMSYISQVPFVIVDLRNMRSIKIDVHSQTAWVEAGATLGEVYYWINEKNENLSFPAGYCPTVGAGGHFSGGGYGALMRNYGLAADNIIDAHLVNVDGKVLDRKSMGEDLFWAIRGGGGESFGIIVAWKIRLVAVPSKSTMFSVKKNMEIHELVKLVNKWQNIAYKYDKDLLLMTHFITRNITDNQGKNKTTIHSYFSSIFLGGVDSLVDLMNKSFPELGIKKTDCKQLSWIDTIIFYSGVVNYDTTNFKKEILLDRSAGQNAAFKIKLDYVKKPIPETVMVKILEKLYEEDVGVGMYVLYPYGGIMDEISESAIPFPHRAGIMYELWYIASWEKQEDNEKHLNWIRNVYNFMTPYVSQNPRLAYLNYRDLDLGKNNPKSPNNYTQARIWGEKYFGKNFNRLVKVKTKVDPNNFFRNEQSIPPLPRHRHHDEL

SEQ ID NO: 1214 - protein, 540 aa, Artificial Sequence
  Synthetic
MKFISTFLTFILAAVSVTANPQENFLKCFSQYIPNNVANPKLVYTQHDQLYMSILNSTIQNLRFTSDTTPKPLVIVTPSNVSHIQATILCSKKVGLQIRTRSGGHDAEGMSYISQVPFVIVDLRNMHSIKIDVHSQTAWVEAGATLGEVYYWINEKNENLSFPGGYCPTVGVGGHFSGGGYGALMRNYGLAADNIIDAHLVNVDGKVLDRKSMGEDLFWAIRGGGGENFGIIAAWKIKLVAVPSKSTIFSVKKNMEIHGLVKLFNKWQNIAYKYDKDLLLMTHFITRNITDNHGKNKTTVHGYFSSIFHGGVDSLVDLMNKSFPELGIKKTDCKELSWIDTTIFYSGVVNYNTANFKKEILLDRSAGKKTAFSIKLDYVKKPIPETAMVKILEKLYEEDVGVGMYVLYPYGGIMDEISESAIPFPHRAGIMYELWYTASWEKQEDNEKHINWVRSVYNFTTPYVSQNPRLAYLNYRDLDLGKTNPESPNNYTQARIWGEKYFGKNFNRLVKVKTKVDPNNFFRNEQSIPPLPPHHHHDEL

SEQ ID NO: 1215 - DNA, 1620 bp, Artificial Sequence
  Synthetic
atgaagtttatcagtaccttcttgacctttatcttggccgctgtctccgtaaccgctaatccaagagaaaatttcttgaagtgtttttctcagtatatcccgaataatgcgacgaaccttaacttagtatacactcagaacaaccctctatatatgagcgttctaaattctacaatccacaacctaagatttacgtccgacacgactccgaaacccctagttatagtgacaccgtcacatgttagccatatacagggcaccatactatgttccaaaaaagttgggttacaaatacgtacccgtagcgggggacacgacagtgaggggatgagttatattagtcaggtgcctttcgtcatagtggatttaagaaatatgaggtcaattaaaatcgacgttcactcacaaactgcctgggttgaggcgggggccacattgggtgaagtatattactgggtcaatgagaagaacgagaatctttcactagcagccggttattgtcccacagtctgcgccggcggtcactttggcggcggcggatacggtcccttaatgagaaattacgggcttgccgcagacaatatcatagatgctcacttagttaatgttcatggaaaagtgttagaccgtaaaagcatgggggaggatctgttttgggcgcttagagggggaggggcagaatcatttggaataatagtggcatggaaaatcaggcttgtggctgttccaaagagtaccatgttctcagtaaagaaaataatggagatccatgagctagttaaacttgtgaataaatggcaaaacatagcctataaatatgataaggacttgctgcttatgactcatttcataaccagaaacattacggataaccaagggaagaacaaaacagccatccatacctactttagctccgttttcttgggtggtgtagacagcttagttgacctgatgaacaagagttttccggaactaggtatcaagaagacagattgtagacaactttcctggattgataccataatcttttacagcggagtcgtcaattatgacactgacaacttcaacaaggaaattttattagataggagtgcgggtcaaaatggggccttcaagatcaaactagactacgttaaaaaacccattcctgaaagtgtttttgttcagattctggagaagctgtatgaagaagatattggcgcggggatgtacgctctttatccgtacggcggcataatggatgagattagtgaaagcgccatccctttcccccacagagctggtatcctgtacgagttgtggtatatctgctcctgggagaaacaggaggataacgaaaagcacttaaattggattaggaatatctacaatttcatgacgccctacgtttccaagaaccccaggttggcctatttgaactacagggatcttgatattggaatcaacgaccccaaaaacccaaacaactacacccaggcaaggatttggggagagaagtacttcgggaagaacttcgacaggctagttaaggtgaaaacgctagttgatccaaataattttttcagaaacgaacagagtatccctcccttaccgcgtcataggcaccatgatgaattataa

SEQ ID NO: 1216 - DNA, 1620 bp, Artificial Sequence
  Synthetic
atgaagtttatcagtaccttcttgacctttatcttggccgctgtctccgtaaccgctaatccaagagaaaatttcttgaagtgtttttctcagtatatcccgaataatgcgacgaaccttaagttagtatacactcagaacaaccctctatatatgagcgttctaaattctacaatccacaacctaagatttacgtccgacacgactccgaaacccctagttatagtgacaccgtcacatgttagccatatacagggcaccatactatgttccaaaaaagttgggttacaaatacgtacccgtagcgggggacacgacgccgaggggatgagttatattagtcaggtgcctttcgtcatagtggatttaagaaatatgaggtcaattaaaatcgacgttcactcacaaactgcctgggttgaggcgggggccacattgggtgaagtatattactgggtcaatgagaagaacgagaatctttcactagcagccggttattgtcccacagtctgcgccggcggtcactttggcggcggcggatacggtcccttaatgagaaattacgggcttgccgcagacaatatcatagatgctcacttagttaatgttcatggaaaagtgttagaccgtaaaagcatgggggaggatctgttttgggcgcttagagggggaggggcagaatcatttggaataatagtggcatggaaaatcaggcttgtggctgttccaaagagtaccatgttctcagtaaagaaaataatggagatccatgagctagttaaacttgtgaataaatggcaaaacatagcctataaatatgataaggacttgctgcttatgactcatttcataaccagaaacattacggataaccaagggaagaacaaaacagccatccatacctactttagctccgttttcttgggtggtgtagacagcttagttgacctgatgaacaagagttttccggaactaggtatcaagaagacagattgtagacaactttcctggattgataccataatcttttacagcggagtcgtcaattatgacactgacaacttcaacaaggaaattttattagataggagtgcgggtcaaaatggggccttcaagatcaaactagactacgttaaaaaacccattcctgaaagtgtttttgttcagattctggagaagctgtatgaagaagatattggcgcggggatgtacgctctttatccgtacggcggcataatggatgagattagtgaaagcgccatccctttcccccacagagctggtatcctgtacgagttgtggtatatctgctcctgggagaaacaggaggataacgaaaagcacttaaattggattaggaatatctacaatttcatgacgccctacgtttccaagaaccccaggttggcctatttgaactacagggatcttgatattggaatcaacgaccccaaaaacccaaacaactacacccaggcaaggatttggggagagaagtacttcgggaagaacttcgacaggctagttaaggtgaaaacgctagttgatccaaataattttttcagaaacgaacagagtatccctcccttaccgcgtcataggcaccatgatgaattataa

SEQ ID NO: 1217 - DNA, 1623 bp, Artificial Sequence
  Synthetic
atgaagtttatcagtaccttcttgacctttatcttggccgctgtctccgtaaccgctaacccacaggaaaatttcctgaagtgtttttcccaatacataccgaataacgcgacgaatgctaaactcgtgtatactcaaaatgatcccttatatatgtcagtactaaacagtaccatccaaaatttgcggtttacatcggacactactccaaaacctttggttattgttacacctagcaatgtcagtcatattcagggtaccatcttatgctctaagaaagtcgggcttcaaataagaacacgatcaggcggtcacgatgcagagggaatgtcgtacatttcacaagtaccattcgttattgttgatctaaggaacatgagatctattaagatagacgtgcattctcagactgcctgggttgaagctggtgcaacattgggagaagtgtattactggataaacgagaaaaatgaaaatttatcttttcccgcgggctattgtcctaccgtaggtgcagggggtcacttctctggagggggttatggagccctgatgagaaactacggtcttgctgctgataatatcattgacgctcatctagttaatgttgatggaaaagtattggaccgtaaatccatgggcgaggatttattttgggccatcaggggtgggggcggtgaaagtttcggcattattgtcgcatggaagatccgtcttgtggcagttccatcaaaaagcacgatgttttcagtcaagaaaaacatggaaatacatgaactggtcaaattagtgaataagtggcaaaacatcgcgtataaatacgataaggatttgcttctgatgacacatttcataactcgcaatattaccgacaaccaaggtaaaaataagacaactattcactcgtatttttcttccatattcttgggaggtgtagattccctcgttgatcttatgaataaatcatttccagaactaggcatcaaaaaaacagactgcaagcagttatcctggatcgataccattatattttactcgggagttgtcaattacgatacaactaactttaagaaagagattttattggacagaagtgccggtcaaaacgctgcattcaagatcaagttggattatgtgaaaaaacccatacctgaaaccgttatggtaaaaattctggagaaactatatgaagaagatgtcggcgttggtatgtatgttttatacccttatggaggtatcatggacgagattagtgaatcagctattccattcccgcacagagctggaatcatgtatgagctttggtacatagcgtcatgggaaaaacaagaagataatgaaaagcatttaaactggataaggaatgtatataattttatgactccatacgtgagccagaatcctagattagcatatttgaactacagagacttagatttaggtaagaataaccccaaaagtccaaacaattatacgcaagccaggatatggggagaaaagtactttggtaaaaattttaatagacttgtaaaggttaagacgaaagtcgacccgaacaatttctttcggaacgagcaatctattccgccactgcctcgccatagacatcatgatgaattataa

SEQ ID NO: 1218 - DNA, 1629 bp, Artificial Sequence
  Synthetic
atgaagtttatcagtaccttcttgacctttatcttggccgctgtctccgtaaccgctaacccgcaagagaatttcctaaagtgcttttctcagtatatccctaataacgccacgaaaagtaatgcgaaattggtatacactcaaaacgacccactttatatgtcagtgttaaatagcacaattcaaaatctgcggtttacctcggataccacacccaagccattagttatagttactccttctaacgtcagccacattcagggaactatattgtgttcaaaaaaagtcgggctccaaatcagaacacgttccggtggccatgatgcagaaggtatgagttacatttctcaggtaccattcgttattgtagacctacgcaatatgagatccataaagattgatgttcattcacaaactgcatgggtggaagctggtgctactttgggggaagtgtattactggatcaacgaaaaaaatgagaatttatcttttccggccggatactgtcctaccgttggcgctggtggtcacttcagcggtggaggatatggcgcactgatgcgaaactatggtttagctgcggataacatcattgatgctcatttagtaaatgtcgacggcaaagttcttgacagaaagtccatgggggaggatttgttttgggccataaggggtggaggtggtgaaagttttggaatcattgtagcatggaaaataagacttgtggccgttccatcaaagtcgacgatgttcagcgtcaagaagaatatggaaatacatgagctagtcaaattagtaaataaatggcaaaatattgcctataaatacgataaggatttgcttctgatgacacacttcataaccaggaatattacagacaaccaaggcaaaaacaaaactactattcattcatacttttcttcgatttttttgggcggtgtggatagtctcgtggacctcatgaacaagtccttccccgaattaggaattaaaaagactgattgcaaacagctatcttggatcgacaccataattttttatagtggggttgttaattacgatacaacgaactttaagaaggaaattttattggaccgttccgctggtcaaaatgcagctttcaaaataaagctagattatgttaaaaaaccgatccctgagacagttatggtcaaaattttagaaaaactgtacgaggaagatgttggtgtcggtatgtatgtgttgtatccatatggaggaataatggatgaaatttcagaatctgcaatcccatttcctcacagagctggtataatgtatgaactttggtatattgcgagctgggaaaagcaagaagataatgaaaagcatctgaattggatcagaaatgtttacaactttatgactccttatgtttcgcaaaatcctaggttggcttacttgaactaccgcgaccttgatctcgggaaaaacaatccaaagagccccaacaattacacacaggctagaatatggggcgagaaatattttggtaagaatttcaaccgattagtgaaggtcaaaacgaaagtagacccaaataatttctttcgtaacgagcaatctattcctcccttaccacggcacagacatcatgatgaattataa

SEQ ID NO: 1219 - DNA, 1623 bp, Artificial Sequence
  Synthetic
atgaagtttatcagtaccttcttgacctttatcttggccgctgtctccgtaaccgctaacccgcaggaaaatttcctaaagtgttttagtcaatacataccaaataacgtcgctaatcccaaacttgtgtatacccaacatgaccaactgtatatgtctatcttaaattcaactattcagaacttgcgatttacgagcgatacaactcctaaaccactcgttattgtaacaccttccaatgtttctcacatccaagccacaattttgtgctcgaagaaagtaggtttacaaatacgtactaggtcaggagggcatgatgcggagggtatgagttacattagccaggttccattcgtgattgtcgaccttagaaatatgcactccataaagatcgatgttcattcgcaaaccgcatgggtagaagctggcgccacgttgggtgaagtgtattactggatcaacgagaaaaacgaaaatttatcctttcctggaggctattgtccaactgttggtgtcggaggtcatttttctggaggtggttatggggcactaatgcgcaattacggcttagctgccgataacattatagatgcacatctggtaaatgttgacggtaaagtcctggacagaaagtcgatgggagaagatctcttctgggcaataagagggggcggaggtgagaattttggcattattgctgcttggaaaataaagttagtggcggttccgtcaaagagcacaatcttttctgtaaaaaagaacatggaaatacacggtttagttaaattgttcaataaatggcagaatattgcctataagtacgataaagacctgttacttatgacccacttcattacacggaatatcactgataaccatggtaaaaataagactacagtgcacggctacttcagtagtatctttcatggaggggttgatagcttggtagatctcatgaataaatcatttcccgaactaggtattaagaaaaccgactgtaaagagttgtcttggatagatacaactatattttattcaggtgtagttaactataacacagctaacttcaaaaaagaaattctattggaccgttctgcggggaagaaaacggcattttctataaaactagattatgtcaaaaaacctatcccagaaacggctatggttaagattttggaaaagttgtacgaagaagatgtcggcgtaggtatgtatgtcttatacccgtacggtggaattatggatgaaatcagtgagtcagctattccattcccacatagggcggggatcatgtatgaactctggtacactgcatcgtgggagaagcaagaagataatgaaaagcatattaattgggtgagatctgtatataacttcaccacaccttatgtgtcccaaaatcctagactagcatatttgaattatagggacttggacctgggtaaaactaacccagagtcccccaacaattacactcaagcgagaatatggggagaaaaatactttggcaagaattttaacagattagttaaagtcaagacgaaggttgatcccaataatttctttcgcaacgagcagtcgatacctcccctcccacctcaccatcatcatgatgaattataa

SEQ ID NO: 1220 - protein, 540 aa, Artificial Sequence; identical to SEQ ID NO: 247
  Synthetic

1. A host cell that comprises a heterologous polynucleotide encoding a terminal synthase (TS), wherein relative to the sequence of SEQ ID NO: 14, the TS comprises an amino acid substitution at one or more residues corresponding to positions 36, 44, 47, 52, 58, 76, 85, 88, 89, 95, 129, 136, 150, 158, 181, 211, 237, 242, 247, 255, 267, 268, 273, 274, 288, 302, 309, 318, 329, 340, 344, 345, 351, 360, 361, 363, 379, 382, 396, 419, 424, 443, 459, 462, 464, 469, 479, 475, 491, 492, and/or 499 in SEQ ID NO: 14, and wherein the TS is capable of producing a THC-type cannabinoid.

2. The host cell of claim 1, wherein relative to the sequence of SEQ ID NO: 14, the TS further comprises an amino acid substitution at one or more residues corresponding to positions 31, 40, 41, 46, 49, 51, 56, 59, 61, 63, 74, 90, 96, 100, 103, 116, 143, 173, 196, 250, 257, 290, 296, 311, 354, 377, 378, 411, 417, 446, 494, 495, 528, 542, 543 and/or 544 in SEQ ID NO: 14.

3. The host cell of claim 1 or 2, wherein the TS is capable of producing more of a THC-type cannabinoid than a control TS, wherein the control TS comprises the sequence of SEQ ID NO: 284 or SEQ ID NO: 21.

4. A host cell that comprises a heterologous polynucleotide encoding a terminal synthase (TS), wherein relative to the sequence of SEQ ID NO: 14, the TS comprises an amino acid substitution at one or more residues corresponding to positions 31, 36, 40, 41, 44, 46, 47, 49, 51, 52, 56, 58, 59, 61, 63, 74, 76, 85, 88, 89, 90, 95, 96, 100, 103, 116, 129, 136, 143, 150, 158, 173, 181, 196, 211, 237, 242, 247, 250, 255, 257, 267, 268, 273, 274, 288, 290, 296, 302, 309, 311, 318, 329, 340, 344, 345, 351, 354, 360, 361, 363, 377, 378, 379, 382, 396, 411, 417, 419, 424, 443, 446, 459,462, 464, 469, 479, 475, 491, 492, 494, 495, 499, 528, 542, 543, and/or 544 in SEQ ID NO: 14, wherein the TS does not comprise SEQ ID NO: 20, 21, 320 or 321, wherein the TS is capable of producing more of a THC-type cannabinoid than a control TS, and wherein the control TS comprises the sequence of SEQ ID NO: 284 or SEQ ID NO: 21.

5. The host cell of any one of claims 1-4, wherein the THC-type cannabinoid is tetrahydrocannabinolic acid (THCA) and/or tetrahydrocannabivarinic acid (THCVA).

6. The host cell of any one of claims 1-5, wherein the TS is capable of producing at least 0.05%, 0.075%, 0.1%, 0.5%, 0.75%, 1%, 5%, 10%, 20%, 30%, 40%, 50%, 60%, 70%, 80%, 90%, 120%, 150%, 170%, 200%, 240%, 290%, or 300% more of a THC-type cannabinoid than a control TS, and wherein the control TS comprises the sequence of SEQ ID NO: 284 or SEQ ID NO: 21.

7. The host cell of any one of claims 1-6, wherein the TS is capable of producing at least 1, 2, 3, or 4-fold more of a THC-type cannabinoid than a control TS, and wherein the control TS comprises the sequence of SEQ ID NO: 284 or SEQ ID NO: 21.

8. The host cell of any one of claims 2-7, wherein the TS comprises:
(i) the amino acid Q at a residue corresponding to position 31 in SEQ ID NO: 14;
(ii) the amino acid H or Q at a residue corresponding to position 36 in SEQ ID NO: 14;
(iii) the amino acid E or Q at a residue corresponding to position 40 in SEQ ID NO: 14;
(iv) the amino acid Y at a residue corresponding to position 41 in SEQ ID NO: 14;
(v) the amino acid T at a residue corresponding to position 44 in SEQ ID NO: 14;
(vi) the amino acid A or P at a residue corresponding to position 46 in SEQ ID NO: 14;
(vii) the amino acid T at a residue corresponding to position 47 in SEQ ID NO: 14;
(viii) the amino acid A at a residue corresponding to position 49 in SEQ ID NO: 14;
(ix) the amino acid F at a residue corresponding to position 51 in SEQ ID NO: 14;
(x) the amino acid I at a residue corresponding to position 52 in SEQ ID NO: 14;
(xi) the amino acid N at a residue corresponding to position 56 in SEQ ID NO: 14,
(xii) the amino acid P or S at a residue corresponding to position 58 in SEQ ID NO: 14;
(xiii) the amino acid F at a residue corresponding to position 59 in SEQ ID NO: 14;
(xiv) the amino acid S at a residue corresponding to position 61 in SEQ ID NO: 14;
(xv) the amino acid L or V at a residue corresponding to position 63 in SEQ ID NO: 14;
(xvi) the amino acid T at a residue corresponding to position 74 in SEQ ID NO. 14;
(xvii) the amino acid N at a residue corresponding to position 76 in SEQ ID NO: 14;
(xviii) the amino acid I at a residue corresponding to position 85 in SEQ ID NO: 14;
(xix) the amino acid L at a residue corresponding to position 88 in SEQ ID NO: 14;
(xx) the amino acid D, E, or H at a residue corresponding to position 89 in SEQ ID NO: 14;
(xxi) the amino acid E or V at a residue corresponding to position 90 in SEQ ID NO: 14;
(xxii) the amino acid G at a residue corresponding to position 95 in SEQ ID NO: 14;
(xxiii) the amino acid S at a residue corresponding to position 96 in SEQ ID NO: 14;
(xxiv) the amino acid A at a residue corresponding to position 100 in SEQ ID NO: 14;
(xxv) the amino acid I at a residue corresponding to position 103 in SEQ ID NO: 14;
(xxvi) the amino acid S at a residue corresponding to position 116 in SEQ ID NO: 14;
(xxvii) the amino acid I at a residue corresponding to position 129 in SEQ ID NO: 14;
(xxviii) the amino acid R at a residue corresponding to position 136 in SEQ ID NO: 14;
(xxix) the amino acid E at a residue corresponding to position 143 in SEQ ID NO: 14;
(xxx) the amino acid Q at a residue corresponding to position 150 in SEQ ID NO: 14;
(xxxi) the amino acid L at a residue corresponding to position 158 in SEQ ID NO: 14;
(xxxii) the amino acid A at a residue corresponding to position 173 in SEQ ID NO: 14;
(xxxiii) the amino acid A at a residue corresponding to position 181 in SEQ ID NO: 14;
(xxxiv) the amino acid K at a residue corresponding to position 196 in SEQ ID NO: 14;
(xxxv) the amino acid D at a residue corresponding to position 211 in SEQ ID NO: 14;
(xxxvi) the amino acid S at a residue corresponding to position 237 in SEQ ID NO: 14;
(xxxvii) the amino acid V at a residue corresponding to position 242 in SEQ ID NO: 14;
(xxxviii) the amino acid R at a residue corresponding to position 247 in SEQ ID NO: 14;
(xxxix) the amino acid D or P at a residue corresponding to position 250 in SEQ ID NO: 14;
(xl) the amino acid V at a residue corresponding to position 255 in SEQ ID NO: 14;
(xli) the amino acid M or R at a residue corresponding to position 257 in SEQ ID NO: 14;
(xlii) the amino acid N at a residue corresponding to position 267 in SEQ ID NO: 14;
(xliii) the amino acid E at a residue corresponding to position 268 in SEQ ID NO: 14;
(xliv) the amino acid V at a residue corresponding to position 273 in SEQ ID NO: 14;
(xlv) the amino acid H at a residue corresponding to position 274 in SEQ ID NO: 14;
(xlvi) the amino acid L, M, or T at a residue corresponding to position 288 in SEQ ID NO: 14;
(xlvii) the amino acid F at a residue corresponding to position 290 in SEQ ID NO: 14;
(xlviii) the amino acid R at a residue corresponding to position 296 in SEQ ID NO: 14;
(xlix) the amino acid Q at a residue corresponding to position 302 in SEQ ID NO: 14;
(l) the amino acid I at a residue corresponding to position 309 in SEQ ID NO: 14;
(li) the amino acid S at a residue corresponding to position 311 in SEQ ID NO: 14;
(lii) the amino acid L at a residue corresponding to position 318 in SEQ ID NO: 14;
(liii) the amino acid Q at a residue corresponding to position 329 in SEQ ID NO: 14;
(liv) the amino acid E at a residue corresponding to position 340 in SEQ ID NO: 14;
(lv) the amino acid Q at a residue corresponding to position 344 in SEQ ID NO: 14;
(lvi) the amino acid L or M at a residue corresponding to position 345 in SEQ ID NO: 14;
(lvii) the amino acid I at a residue corresponding to position 351 in SEQ ID NO: 14;
(lviii) the amino acid F at a residue corresponding to position 354 in SEQ ID NO: 14;
(lix) the amino acid Y at a residue corresponding to position 360 in SEQ ID NO: 14;
(lx) the amino acid D at a residue corresponding to position 361 in SEQ ID NO: 14;
(lxi) the amino acid T at a residue corresponding to position 363 in SEQ ID NO: 14;
(lxii) the amino acid Q at a residue corresponding to position 377 in SEQ ID NO: 14;
(lxiii) the amino acid N at a residue corresponding to position 378 in SEQ ID NO: 14;
(lxiv) the amino acid A at a residue corresponding to position 379 in SEQ ID NO: 14;
(lxv) the amino acid K at a residue corresponding to position 382 in SEQ ID NO: 14;
(lxvi) the amino acid V at a residue corresponding to position 396 in SEQ ID NO: 14;
(lxvii) the amino acid V at a residue corresponding to position 411 in SEQ ID NO: 14;
(lxviii) the amino acid V at a residue corresponding to position 417 in SEQ ID NO: 14;
(lxix) the amino acid F at a residue corresponding to position 419 in SEQ ID NO: 14;
(lxx) the amino acid D at a residue corresponding to position 424 in SEQ ID NO: 14;
(lxxi) the amino acid I at a residue corresponding to position 443 in SEQ ID NO: 14;
(lxxii) the amino acid I at a residue corresponding to position 446 in SEQ ID NO: 14;
(lxxiii) the amino acid L at a residue corresponding to position 459 in SEQ ID NO: 14;
(lxxiv) the amino acid I at a residue corresponding to position 462 in SEQ ID NO: 14;
(lxxv) the amino acid N at a residue corresponding to position 464 in SEQ ID NO: 14;
(lxxvi) the amino acid M at a residue corresponding to position 469 in SEQ ID NO: 14;
(lxxvii) the amino acid K at a residue corresponding to position 475 in SEQ ID NO: 14;
(lxxviii) the amino acid M at a residue corresponding to position 479 in SEQ ID NO: 14;
(lxxix) the amino acid M at a residue corresponding to position 491 in SEQ ID NO: 14;
(lxxx) the amino acid N at a residue corresponding to position 492 in SEQ ID NO: 14;
(lxxxi) the amino acid D, E, F, or P at a residue corresponding to position 494 in SEQ ID NO: 14;
(lxxxii) the amino acid E or K at a residue corresponding to position 495 in SEQ ID NO: 14;
(lxxxiii) the amino acid Q at a residue corresponding to position 499 in SEQ ID NO: 14;
(lxxxiv) the amino acid D at a residue corresponding to position 528 in SEQ ID NO: 14;
(lxxxv) the amino acid L or R at a residue corresponding to position 542 in SEQ ID NO: 14;
(lxxxvi) the amino acid R at a residue corresponding to position 543 in SEQ ID NO: 14; and/or
(lxxxvii) the amino acid R at a residue corresponding to position 544 in SEQ ID NO: 14.

9. The host cell of any one of claims 1-7, wherein the TS comprises:
(i) the amino acid H or Q at a residue corresponding to position 36 in SEQ ID NO: 14;
(ii) the amino acid T at a residue corresponding to position 44 in SEQ ID NO: 14;
(iii) the amino acid T at a residue corresponding to position 47 in SEQ ID NO: 14,
(iv) the amino acid I at a residue corresponding to position 52 in SEQ ID NO: 14;
(v) the amino acid P or S at a residue corresponding to position 58 in SEQ ID NO: 14;
(vi) the amino acid I at a residue corresponding to position 85 in SEQ ID NO: 14,
(vii) the amino acid L at a residue corresponding to position 88 in SEQ ID NO: 14;
(viii) the amino acid D, E, or H at a residue corresponding to position 89 in SEQ ID NO: 14;
(ix) the amino acid G at a residue corresponding to position 95 in SEQ ID NO: 14;
(x) the amino acid I at a residue corresponding to position 129 in SEQ ID NO: 14;
(xi) the amino acid R at a residue corresponding to position 136 in SEQ ID NO: 14;
(xii) the amino acid Q at a residue corresponding to position 150 in SEQ ID NO: 14;
(xiii) the amino acid L at a residue corresponding to position 158 in SEQ ID NO: 14;
(xiv) the amino acid A at a residue corresponding to position 181 in SEQ ID NO: 14;
(xv) the amino acid D at a residue corresponding to position 211 in SEQ ID NO: 14;
(xvi) the amino acid S at a residue corresponding to position 237 in SEQ ID NO: 14;
(xvii) the amino acid V at a residue corresponding to position 242 in SEQ ID NO: 14;
(xviii) the amino acid R at a residue corresponding to position 247 in SEQ ID NO: 14;
(xix) the amino acid V at a residue corresponding to position 255 in SEQ ID NO: 14;
(xx) the amino acid N at a residue corresponding to position 267 in SEQ ID NO: 14;
(xxi) the amino acid E at a residue corresponding to position 268 in SEQ ID NO: 14;
(xxii) the amino acid V at a residue corresponding to position 273 in SEQ ID NO: 14;
(xxiii) the amino acid H at a residue corresponding to position 274 in SEQ ID NO: 14;
(xxiv) the amino acid L, M, or T at a residue corresponding to position 288 in SEQ ID NO: 14;
(xxv) the amino acid Q at a residue corresponding to position 302 in SEQ ID NO: 14;
(xxvi) the amino acid I at a residue corresponding to position 309 in SEQ ID NO: 14;
(xxvii) the amino acid L at a residue corresponding to position 318 in SEQ ID NO: 14;
(xxviii) the amino acid Q at a residue corresponding to position 329 in SEQ ID NO: 14;
(xxix) the amino acid E at a residue corresponding to position 340 in SEQ ID NO: 14;
(xxx) the amino acid Q at a residue corresponding to position 344 in SEQ ID NO: 14,
(xxxi) the amino acid L or M at a residue corresponding to position 345 in SEQ ID NO: 14;
(xxxii) the amino acid I at a residue corresponding to position 351 in SEQ ID NO: 14;
(xxxiii) the amino acid Y at a residue corresponding to position 360 in SEQ ID NO: 14;
(xxxiv) the amino acid D at a residue corresponding to position 361 in SEQ ID NO: 14;
(xxxv) the amino acid T at a residue corresponding to position 363 in SEQ ID NO: 14;
(xxxvi) the amino acid A at a residue corresponding to position 379 in SEQ ID NO: 14;
(xxxvii) the amino acid K at a residue corresponding to position 382 in SEQ ID NO: 14;
(xxxviii) the amino acid V at a residue corresponding to position 396 in SEQ ID NO: 14;
(xxxix) the amino acid F at a residue corresponding to position 419 in SEQ ID NO: 14;
(xl) the amino acid D at a residue corresponding to position 424 in SEQ ID NO: 14;
(xli) the amino acid I at a residue corresponding to position 443 in SEQ ID NO: 14;
(xlii) the amino acid L at a residue corresponding to position 459 in SEQ ID NO: 14;
(xliii) the amino acid I at a residue corresponding to position 462 in SEQ ID NO: 14;
(xliv) the amino acid N at a residue corresponding to position 464 in SEQ ID NO: 14;
(xlv) the amino acid M at a residue corresponding to position 469 in SEQ ID NO: 14;
(xlvi) the amino acid M at a residue corresponding to position 479 in SEQ ID NO: 14,
(xlvii) the amino acid M at a residue corresponding to position 491 in SEQ ID NO: 14;
(xlviii) the amino acid N at a residue corresponding to position 492 in SEQ ID NO: 14; and/or
(xlix) the amino acid Q at a residue corresponding to position 499 in SEQ ID NO: 14.

10. The host cell of any one of claims 2-8, wherein the TS comprises at least 2, 3, 4, 5, 6, 7, 8, 9, 10, 11, 12, 13, 14, 15, or 16 amino acid substitutions at residues corresponding to positions 31, 36, 40, 41, 44, 46, 47, 49, 51, 52, 56, 58, 59, 61, 63, 74, 76, 85, 88, 89, 90, 95, 96, 100, 103, 116,129, 136, 143, 150, 158, 173, 181, 196, 211, 237, 242, 247, 250, 255, 257, 267, 268, 273, 274, 288, 290, 296, 302, 309, 311, 318, 329, 340, 344, 345, 351, 354, 360, 361, 363, 377, 378, 379, 382, 396, 411, 417, 419, 424, 443, 446, 459, 462, 464, 469, 479, 475, 491, 492, 494, 495, 499, 528, 542, 543, and/or 544 in SEQ ID NO: 14.

11. The host cell of any one of claims 1-9, wherein the TS comprises at least 2, 3, 4, 5, 6, 7, 8, 9, 10, 11, 12, 13, 14, 15, or 16 amino acid substitutions at residues corresponding to positions 36, 44, 47, 52, 58, 76, 85, 88, 89, 95, 129, 136, 150, 158, 181, 211, 237, 242, 247, 255, 267, 268, 273, 274, 288, 302, 309, 318, 329, 340, 344, 345, 351, 360, 361, 363, 379, 382, 396, 419, 424, 443, 459, 462, 464, 469, 479, 475, 491, 492, and/or 499 in SEQ ID NO: 14.

12. The host cell of any one of claims 2-11, wherein the TS comprises relative to SEQ ID NO: 14:
(i) R31Q, H56N, Q58S, M61S, I74T, N90V, H143E, A250P, S255V, V288L, T340E, F345L, E424D, Q475K, T492N, and P542L;
(ii) R31Q, V52I, H56N, Q58S, M61S, I74T, N90V, A250P, S255V, V288L, F345L, Q475K, and T492N;
(iii) R31Q, A47T, V52I, H56N, Q58S, M61S, I74T, N90V, H143E, A250P, S255V, V288L, T340E, F345L, Q475K, and T492N;
(iv) H56N, Q58S, M61S, I74T, N90V, H143E, A250D, S255V, V288L, F345L, Q475K, T492N, and A495E;
(v) R31Q, H56N, Q58S, M61S, I74T, N90V, H143E, A250P, S255V, V288L, Q475K, and T492N;
(vi) R31Q, A47T, H56N, Q58S, M61S, I74T, N90V, H143E, A250P, S255V, V288L, T340E, F345L, E424D, Q475K, and T492N;
(vii) A47T, H56N, Q58S, M61S, I74T, N90V, A250D, S255V, F345L, E424D, Q475K, and T492N;
(viii) R31Q, A47T, H56N, Q58S, M61S, I74T, N90V, A250P, S255V, V288L, T340E, F345L, Q475K, and T492N;
(ix) R31Q, A47T, H56N, Q58S, M61S, I74T, N90V, H143E, A250P, S255V, V288L, T340E, F345L, Q475K, and T492N;
(x) A47T, H56N, Q58S, M61S, I74T, N90V, A250D, S255V, F345L, Q475K, and T492N;
(xi) R31Q, A47T, H56N, Q58S, M61S, I74T, N90V, H143E, A250P, S255V, T340E, F345L, Q475K, and T492N;
(xii) R31Q, H56N, Q58S, M61S, I74T, N90V, A250P, S255V, V288L, F345L, E424D, Q475K, and T492N;
(xiii) R31Q, A47T, H56N, Q58S, M61S, I74T, N90V, A250P, S255V, T340E, F345L, E424D, Q475K, and T492N;
(xiv) A47T, H56N, Q58S, M61S, I74T, N90V, A250D, S255V, V288L, F345L, Q475K, and T492N;
(xv) H56N, Q58S, M61S, I74T, N90V, H143E, A250D, S255V, V288L, F345L, Q475K, and T492N; or
(xvi) R31Q, V52I, H56N, M61S, I74T, N90V, A250P, S255V, F345L, Q475K, and T492N.

13. The host cell of any one of claims 1-11, wherein the TS comprises relative to SEQ ID NO: 14:
(i) M61S, N90V, A250D, S255V, Q475K, T492N, and A495E;
(ii) H56N, M61S, I74T, N90V, A250P, S255V, T492N, and H494E; or
(iii) R31Q, H56N, I74T, N90V, A250P, S255V, Q475K, T492N, H494E, and A495E.

14. The host cell of claim 13, wherein the TS comprises a sequence that is at least 90%, at least 95%, at least 97%, at least 98%, or at least 99% identical to any one of SEQ ID NOs: 505, 563, or 560.

15. The host cell of any one of claims 1-13, wherein the TS comprises a sequence that is at least 90%, at least 95%, at least 97%, at least 98%, or at least 99% identical to any one of SEQ ID NOs: 138, 140, 141, 144, 155, 158, 164, 178, 198-200, 203, 285-289, 290-313, 474-487, 490-491, 499, 501-502, 504-505, 512, 515-517, 521-522, 524, 526-529, 532, 534-536, 538, 542-545, 548-605, 698-802, 804-811, 813-815, 820, 824, 826, 828-832, 834, 837-838, 845, 848, 850-851, 876, and 884-913.

16. The host cell of claim 15, wherein the TS comprises a sequence that is at least 90%, at least 95%, at least 97%, at least 98%, or at least 99% identical to any one of SEQ ID NOs: 711, 713, 715, 718, 719, 724, 726, 733, 734, 741, 765, 884, 885, 890, 891, and 900.

17. The host cell of claim 15, wherein the TS comprises the sequence of any one of SEQ ID NOs: 138, 140, 141, 144, 155, 158, 164, 178, 198-200, 203, 285-289, 290-313, 474-487, 490-491, 499, 501-502, 504-505, 512, 515-517, 521-522, 524, 526-529, 532, 534-536, 538, 542-545, 548-605, 698-802, 804-811, 813-815, 820, 824, 826, 828-832, 834, 837-838, 845, 848, 850-851, 876, and 884-913.

18. A host cell that comprises a heterologous polynucleotide encoding a terminal synthase (TS), wherein the TS comprises:
(i) a sequence that is at least 97% identical to SEQ ID NO: 40;
(ii) a sequence that is at least 98% identical to any one of SEQ ID NO: 37, 39, and 42;
(iii) a sequence that is at least 99% identical to SEQ ID NO: 43; or
(iv) a sequence comprising SEQ ID NO: 38;
wherein the host cell is capable of producing a THC-type cannabinoid.

19. The host cell of claim 18, wherein the THC-type cannabinoid is tetrahydrocannabinolic acid (THCA) and/or tetrahydrocannabivarinic acid (THCVA).

20. The host cell of claim 18 or 19, wherein the TS is capable of producing more of a THC-type cannabinoid than a control TS, wherein the control TS comprises the sequence of SEQ ID NO: 284 or SEQ ID NO: 21.

21. The host cell of any one of claims 18-20, wherein the TS is capable of producing at least 0.05%, 0.075%, 0.1%, 0.5%, 0.75%, 1%, 5%, 10%, 20%, 30%, 40%, 50%, 60%, 70%, 80%, 90%, 120%, 150%, 170%, 200%, 240%, 290%, or 300% more of a THC-type cannabinoid than a control TS, wherein the control TS comprises the sequence of SEQ ID NO: 284 or SEQ ID NO: 21.

22. The host cell of any one of claims 1-21, wherein the TS further comprises a first signal peptide.

23. The host cell of claim 22, wherein the first signal peptide comprises SEQ ID NO: 16 or a sequence that has no more than two amino acid substitutions, insertions, additions, or deletions relative to the sequence of SEQ ID NO: 16.

24. The host cell of claim 22 or 23, wherein the first signal peptide is located at the amino terminus of the TS.

25. The host cell of claim 23 or 24, wherein a methionine residue is added to the N-terminus of SEQ ID NO: 16.

26. The host cell of any one of claims 22-25, wherein the TS further comprises a second signal peptide.

27. The host cell of claim 26, wherein the second signal peptide comprises SEQ ID NO: 17 or a sequence that has no more than one amino acid substitution, insertion, addition, or deletion relative to the sequence of SEQ ID NO: 17.

28. The host cell of claim 26 or 27, wherein the second signal peptide is located at the carboxyl terminus of the TS.

29. The host cell of any one of claims 1-28, wherein the host cell further produces one or more of cannabidiolic acid (CBDA), cannabidivarinic acid (CBDVA), cannabichromenic acid (CBCA) and/or cannabichromevarinic acid (CBCVA).

30. The host cell of any one of claims 1-29, wherein the TS produces a higher ratio of THCA:CBDA, THCA:CBCA, THCVA:CBDVA and/or THCVA:CBCVA than a control TS.

31. The host cell of claim 30, wherein the control TS is a TS comprising the sequence of SEQ ID NO: 284 or SEQ ID NO: 21.

32. The host cell of any one of 1-31, wherein the TS has a higher product specificity for a THC-type cannabinoid than a control TS.

33. The host cell of claim 32, wherein the control TS is a TS comprising the sequence of SEQ ID NO: 284 or SEQ ID NO: 21.

34. A host cell that comprises a heterologous polynucleotide encoding a terminal synthase (TS), wherein relative to the sequence of SEQ ID NO: 13, the TS comprises an amino acid substitution at one or more residues corresponding to positions 79, 90, 106, 150, 166, 184, 211, 216, 230, 263, 273, 283, 290, 292, 319, 322, 339, 353, 380, 386, 397, 407, 416, 418, 441, 442, 446, 479, 450, 452, 454, 467, 481, 486, 504, and/or 512 in SEQ ID NO: 13, and wherein the TS is capable of producing a CBD-type cannabinoid.

35. The host cell of claim 34, wherein relative to the sequence of SEQ ID NO: 13, the TS further comprises an amino acid substitution at one or more residues corresponding to positions 31, 47, 49, 50, 56, 57, 58, 69, 89, 95, 100, 103, 116, 124, 143, 162, 167, 168, 171, 172, 175, 180, 196, 213, 250, 287, 343, 344, 376, 377, 378, 394, 410, 414, 415, 445, 490, 492, 517 and/or 542 in SEQ ID NO: 13.

36. The host cell of claim 34 or 35, wherein the TS is capable of producing more of a CBD-type cannabinoid than a control TS, and wherein the control TS comprises the sequence of SEQ ID NO: 136.

37. A host cell that comprises a heterologous polynucleotide encoding a terminal synthase (TS), wherein relative to the sequence of SEQ ID NO: 13, the TS comprises an amino acid substitution at one or more residues corresponding to positions 31, 47, 49, 50, 56, 57, 58, 69, 79, 89, 90, 95, 100, 103, 106, 116, 124, 143, 150, 162, 166, 167, 168, 171, 172, 175, 180, 184, 196, 211, 213, 216, 230, 250, 263, 273, 283, 287, 290, 292, 319, 322, 339, 343, 344, 353, 376, 377, 378, 380, 386, 394, 397, 407, 410, 414, 415, 416, 418, 441, 442, 445, 446, 479, 450, 452, 454, 467, 481, 486, 490, 492, 504, 512, 527 and/or 542 in SEQ ID NO: 13, wherein the TS is capable of producing more of a CBD-type cannabinoid than a control TS, and wherein the control TS comprises the sequence of SEQ ID NO: 136.

38. The host cell of any one of claims 34-37, wherein the CBD-type cannabinoid is CBDA and/or CBDVA.

39. The host cell of any one of claims 34-38, wherein the TS is capable of producing at least 0.05%, 0.075%, 0.1%, 0.5%, 0.75%, 1%, 5%, 10%, 20%, 30%, 40%, 50%, 60%, 70%, 80%, 90%, 120%, 150%, 170%, 200%, 240%, 290%, or 300% more of a CBD-type cannabinoid than a control TS, wherein the control TS comprises the sequence of SEQ ID NO: 136.

40. The host cell of any one of claims 34-39, wherein the TS is capable of producing at least 1, 2, 3, or 4-fold more of a CBD-type cannabinoid than a control TS, and wherein the control TS comprises the sequence of SEQ ID NO: 136.

41. The host cell of any one of claims 35-40, wherein the TS comprises:
(i) the amino acid Q at a residue corresponding to position 31 in SEQ ID NO: 13;
(ii) the amino acid A at a residue corresponding to position 47 in SEQ ID NO: 13;
(iii) the amino acid P at a residue corresponding to position 49 in SEQ ID NO: 13;
(iv) the amino acid N at a residue corresponding to position 50 in SEQ ID NO: 13;
(v) the amino acid H at a residue corresponding to position 56 in SEQ ID NO: 13;
(vi) the amino acid D at a residue corresponding to position 57 in SEQ ID NO: 13;
(vii) the amino acid Q at a residue corresponding to position 58 in SEQ ID NO: 13;
(viii) the amino acid R or Q at a residue corresponding to position 69 in SEQ ID NO: 13;
(ix) the amino acid G at a residue corresponding to position 79 in SEQ ID NO: 13;
(x) the amino acid N, D, E, Q, or R at a residue corresponding to position 89 in SEQ ID NO: 13;
(xi) the amino acid C at a residue corresponding to position 90 in SEQ ID NO: 13;
(xii) the amino acid A at a residue corresponding to position 95 in SEQ ID NO: 13;
(xiii) the amino acid A at a residue corresponding to position 100 in SEQ ID NO: 13;
(xiv) the amino acid H at a residue corresponding to position 103 in SEQ ID NO: 13;
(xv) the amino acid E at a residue corresponding to position 106 in SEQ ID NO: 13;
(xvi) the amino acid A or G at a residue corresponding to position 116 in SEQ ID NO: 13;
(xvii) the amino acid N or M at a residue corresponding to position 124 in SEQ ID NO: 13;
(xviii) the amino acid E at a residue corresponding to position 143 in SEQ ID NO: 13;
(xix) the amino acid Q at a residue corresponding to position 150 in SEQ ID NO: 13;
(xx) the amino acid I at a residue corresponding to position 162 in SEQ ID NO: 13;
(xxi) the amino acid S at a residue corresponding to position 166 in SEQ ID NO: 13;
(xxii) the amino acid K at a residue corresponding to position 167 in SEQ ID NO: 13;
(xxiii) the amino acid T at a residue corresponding to position 168 in SEQ ID NO: 13;
(xxiv) the amino acid F at a residue corresponding to position 171 in SEQ ID NO: 13;
(xxv) the amino acid P at a residue corresponding to position 172 in SEQ ID NO: 13;
(xxvi) the amino acid F at a residue corresponding to position 175 in SEQ ID NO: 13;
(xxvii) the amino acid G at a residue corresponding to position 180 in SEQ ID NO: 13;
(xxviii) the amino acid F at a residue corresponding to position 184 in SEQ ID NO: 13;
(xxix) the amino acid K at a residue corresponding to position 196 in SEQ ID NO: 13;
(xxx) the amino acid D at a residue corresponding to position 211 in SEQ ID NO: 13;
(xxxi) the amino acid N at a residue corresponding to position 213 in SEQ ID NO: 13;
(xxxii) the amino acid L at a residue corresponding to position 216 in SEQ ID NO: 13;
(xxxiii) the amino acid I at a residue corresponding to position 230 in SEQ ID NO: 13;
(xxxiv) the amino acid R at a residue corresponding to position 250 in SEQ ID NO: 13;
(xxxv) the amino acid L at a residue corresponding to position 263 in SEQ ID NO: 13;
(xxxvi) the amino acid H at a residue corresponding to position 273 in SEQ ID NO: 13;
(xxxvii) the amino acid P at a residue corresponding to position 283 in SEQ ID NO: 13;
(xxxviii) the amino acid T at a residue corresponding to position 287 in SEQ ID NO: 13;
(xxxix) the amino acid M or A at a residue corresponding to position 290 in SEQ ID NO: 13;
(xl) the amino acid M at a residue corresponding to position 292 in SEQ ID NO: 13;
(xli) the amino acid D or N at a residue corresponding to position 319 in SEQ ID NO: 13;
(xlii) the amino acid E at a residue corresponding to position 322 in SEQ ID NO: 13;
(xliii) the amino acid E at a residue corresponding to position 339 in SEQ ID NO: 13;
(xliv) the amino acid E at a residue corresponding to position 343 in SEQ ID NO: 13;
(xlv) the amino acid M at a residue corresponding to position 344 in SEQ ID NO: 13;
(xlvi) the amino acid M at a residue corresponding to position 353 in SEQ ID NO: 13;
(xlvii) the amino acid L, Y, A, G, N, P, R, S, T, or V at a residue corresponding to position 376 in SEQ ID NO: 13,
(xlviii) the amino acid F, P, or R at a residue corresponding to position 377 in SEQ ID NO: 13;
(xlix) the amino acid K, R, S, or T at a residue corresponding to position 378 in SEQ ID NO: 13;
(l) the amino acid Y at a residue corresponding to position 380 in SEQ ID NO: 13;
(li) the amino acid F at a residue corresponding to position 386 in SEQ ID NO: 13;
(lii) the amino acid E at a residue corresponding to position 394 in SEQ ID NO: 13;
(liii) the amino acid E or K at a residue corresponding to position 397 in SEQ ID NO: 13;
(liv) the amino acid E at a residue corresponding to position 407 in SEQ ID NO: 13;
(lv) the amino acid T or V at a residue corresponding to position 410 in SEQ ID NO: 13;
(lvi) the amino acid I, L, M, T, or V at a residue corresponding to position 414 in SEQ ID NO: 13,
(lvii) the amino acid M at a residue corresponding to position 415 in SEQ ID NO: 13;
(lviii) the amino acid F, I, or M at a residue corresponding to position 416 in SEQ ID NO: 13;
(lix) the amino acid F at a residue corresponding to position 418 in SEQ ID NO: 13;
(lx) the amino acid S or T at a residue corresponding to position 441 in SEQ ID NO: 13;
(lxi) the amino acid I at a residue corresponding to position 442 in SEQ ID NO: 13;
(lxii) the amino acid V or A at a residue corresponding to position 445 in SEQ ID NO: 13;
(lxiii) the amino acid T or V at a residue corresponding to position 446 in SEQ ID NO: 13;
(lxiv) the amino acid S at a residue corresponding to position 450 in SEQ ID NO: 13,
(lxv) the amino acid T at a residue corresponding to position 452 in SEQ ID NO: 13;
(lxvi) the amino acid A at a residue corresponding to position 454 in SEQ ID NO: 13;
(lxvii) the amino acid Y at a residue corresponding to position 467 in SEQ ID NO: 13;
(lxviii) the amino acid S or T at a residue corresponding to position 479 in SEQ ID NO: 13;
(lxix) the amino acid I, M, V, or Y at a residue corresponding to position 481 in SEQ ID NO: 13;
(lxx) the amino acid V at a residue corresponding to position 486 in SEQ ID NO: 13;
(lxxi) the amino acid T at a residue corresponding to position 490 in SEQ ID NO: 13;
(lxxii) the amino acid N at a residue corresponding to position 492 in SEQ ID NO: 13;
(lxxiii) the amino acid Q at a residue corresponding to position 504 in SEQ ID NO: 13;
(lxxiv) the amino acid N at a residue corresponding to position 512 in SEQ ID NO: 13;
(lxxv) the amino acid D at a residue corresponding to position 527 in SEQ ID NO: 13; and/or
(lxxvi) the amino acid M at a residue corresponding to position 542 in SEQ ID NO: 13.

42. The host cell of any one of claims 34-40, wherein the TS comprises:
(i) the amino acid G at a residue corresponding to position 79 in SEQ ID NO: 13;
(ii) the amino acid C at a residue corresponding to position 90 in SEQ ID NO: 13,
(iii) the amino acid E at a residue corresponding to position 106 in SEQ ID NO: 13;
(iv) the amino acid Q at a residue corresponding to position 150 in SEQ ID NO: 13;
(v) the amino acid S at a residue corresponding to position 166 in SEQ ID NO: 13;
(vi) the amino acid D at a residue corresponding to position 211 in SEQ ID NO: 13;
(vii) the amino acid N at a residue corresponding to position 213 in SEQ ID NO: 13,
(viii) the amino acid L at a residue corresponding to position 216 in SEQ ID NO: 13;
(ix) the amino acid I at a residue corresponding to position 230 in SEQ ID NO: 13,
(x) the amino acid L at a residue corresponding to position 263 in SEQ ID NO: 13;
(xi) the amino acid H at a residue corresponding to position 273 in SEQ ID NO: 13;
(xii) the amino acid P at a residue corresponding to position 283 in SEQ ID NO: 13;
(xiii) the amino acid T at a residue corresponding to position 287 in SEQ ID NO: 13;
(xiv) the amino acid M or A at a residue corresponding to position 290 in SEQ ID NO: 13;
(xv) the amino acid M at a residue corresponding to position 292 in SEQ ID NO: 13;
(xvi) the amino acid D or N at a residue corresponding to position 319 in SEQ ID NO: 13;
(xvii) the amino acid E at a residue corresponding to position 322 in SEQ ID NO: 13;
(xviii) the amino acid E at a residue corresponding to position 339 in SEQ ID NO: 13;
(xix) the amino acid E at a residue corresponding to position 343 in SEQ ID NO: 13;
(xx) the amino acid M at a residue corresponding to position 344 in SEQ ID NO: 13;
(xxi) the amino acid M at a residue corresponding to position 353 in SEQ ID NO: 13;
(xxii) the amino acid Y at a residue corresponding to position 380 in SEQ ID NO: 13;
(xxiii) the amino acid F at a residue corresponding to position 386 in SEQ ID NO: 13;
(xxiv) the amino acid E at a residue corresponding to position 394 in SEQ ID NO: 13;
(xxv) the amino acid E or K at a residue corresponding to position 397 in SEQ ID NO: 13;
(xxvi) the amino acid E at a residue corresponding to position 407 in SEQ ID NO: 13;
(xxvii) the amino acid F, I, or M at a residue corresponding to position 416 in SEQ ID NO: 13;
(xxviii) the amino acid F at a residue corresponding to position 418 in SEQ ID NO: 13;
(xxix) the amino acid S or T at a residue corresponding to position 441 in SEQ ID NO: 13;
(xxx) the amino acid I at a residue corresponding to position 442 in SEQ ID NO: 13;
(xxxi) the amino acid T or V at a residue corresponding to position 446 in SEQ ID NO: 13;
(xxxii) the amino acid S at a residue corresponding to position 450 in SEQ ID NO: 13;
(xxxiii) the amino acid S or T at a residue corresponding to position 479 in SEQ ID NO: 13;
(xxxiv) the amino acid I, M, V, or Y at a residue corresponding to position 481 in SEQ ID NO: 13;
(xxxv) the amino acid V at a residue corresponding to position 486 in SEQ ID NO: 13;
(xxxvi) the amino acid T at a residue corresponding to position 490 in SEQ ID NO: 13;
(xxxvii) the amino acid Q at a residue corresponding to position 504 in SEQ ID NO: 13; and/or
(xxxviii) the amino acid N at a residue corresponding to position 512 in SEQ ID NO: 13.

43. The host cell of any one of claims 35-41, wherein the TS comprises at least 2, 3, 4, 5, 6, 7, 8, 9, 10, 11, 12, 13, 14, 15, or 16 amino acid substitutions at residues corresponding to positions 31, 47, 49, 50, 56, 57, 58, 69, 79, 89, 90, 95, 100, 103, 106, 116, 124, 143, 150, 162, 166,167, 168, 171, 172, 175, 180, 184, 196, 211, 213, 216, 230, 250, 263, 273, 283, 287, 290, 292, 319, 322, 339, 343, 344, 353, 376, 377, 378, 380, 386, 394, 397, 407, 410, 414, 415, 416, 418, 441, 442, 445, 446, 479, 450, 452, 454, 467, 481, 486, 490, 492, 504, 512, 527 and/or 542 in SEQ ID NO: 13.

44. The host cell of any one of claims 34-42, wherein the TS comprises at least 2, 3, 4, 5, 6, 7, 8, 9, 10, 11, 12, 13, 14, 15, or 16 amino acid substitutions at residues corresponding to positions 79, 90, 106, 150, 166, 184, 211, 216, 230, 263, 273, 283, 290, 292, 319, 322, 339, 353, 380, 386, 397, 407, 416, 418, 441, 442, 446, 479, 450, 452, 454, 467, 481, 486, 504, and/or 512 in SEQ ID NO: 13.

45. The host cell of any one of claims 35-43, wherein the TS comprises relative to SEQ ID NO: 13:
(i) K50N, G95A, N196K, H213N, T339E, Q343E, L344M, and A414V;
(ii) G95A, Y175F, T339E, Q343E, and A414V;
(iii) G95A, S116A, T339E, Q343E, A414V, and N527D;
(iv) G95A, E150Q, V162I, C180G, N196K, N21 ID, N273H, T339E, Q343E, and A414V;
(v) G95A, T339E, Q343E, Q376V, and A414V;
(vi) K50N, G95A, S100A, E150Q, V1621, C180G, N196K, N211D, H213N, S322E, T339E, Q343E, L344M, A414V, E452T, and I504Q;
(vii) G95A, N196K, T339E, Q343E, and A414V;
(viii) 50N, G95A, V103H, H213N, T339E, Q343E, L344M, and A414V;
(ix) G95A, T339E, Q343E, Q376R, and A414V; or
(x) K50N, H213N, L230I, T339E, Q343E, and L344M.

46. The host cell of any one of claims 35-43, wherein the TS comprises relative to SEQ ID NO: 13:
(i) K50N, H213N, L230I, T339E, Q343E, and L344M;
(ii) S100A, T339E, and Q343E;
(iii) T339E, Q343E, L344M, and N527D;
(iv) K50N, V162I, C180G, N196K, N211D, H213N, T339E, Q343E, and L344M;
(v) K50N, E150Q, V162I, C180G, N196K, N211D, H213N, T339E, Q343E, and L344M;
(vi) S116A, H213N, T339E, Q343E, L344M, and N527D;
(vii) N196K, T339E, and Q343E;
(viii) K50N, E150Q, V162I, A172P, C180G, N196K, N211D, H213N, T339E, Q343E, and L344M;
(ix) V216L, T339E, and Q343E;
(x) S116A, H213N, T339E, Q343E, and N527D;
(xi) S116A, T339E, Q343E, and N527D; or
(xii) T339E, Q343E, and Q376P.

47. The host cell of any one of claims 34-46, wherein the TS comprises a sequence that is at least 90%, at least 95%, at least 96%, at least 97%, at least 98%, or at least 99/o identical to any one of SEQ ID NOs: 143, 149, 151-153, 156, 160, 163, 165, 166, 168, 170-172, 175-180, 182-197, 201, 204, 205, 207-225, 464-473, 478-480, 484-485, 487-489, 492-498, 500, 503, 506-548, 550, 551-552, 556, 558, 565, 567, 569-570, 572-578, 582, 584, 586, 588, 591, 593-595, 597, 600, 602, 604, 605, 718, 755, 784, 786, 790-792, 794, 795, 798, 800, 801, 803, 804, 806-810, 812-821, 823, 825, 827-836, 838, 839, 841-868, 870-874, 875-879, 881, 883, 913-932, 939-941, 944, 945, 946, and 948.

48. The host cell of claim 47, wherein the TS comprises a sequence that is at least 90%, at least 95%, at least 96%, at least 97%, at least 98%, or at least 99% identical to any one of SEQ ID NOs: 784, 786, 792, 804, 828, 801, 806, 830, 808, 813, 809, 800, 815, 816 836, 825, 791, 845, 823, and 820.

49. The host cell of claim 47, wherein the TS comprises a sequence that is at least 90%, at least 95%, at least 96%, at least 97%, at least 98%, or at least 99% identical to any one of SEQ ID NOs: 795, 812, 816, 817, 823, 825, 853, 868, 874, 946, 948, and 949.

50. The host cell of claim 47, wherein the TS comprises the sequence of any one of SEQ ID NOs: 143, 149, 151-153, 156, 160, 163, 165, 166, 168, 170-172, 175-180, 182-197, 201, 204, 205, 207-225, 464-473, 478-480, 484-485, 487-489, 492-498, 500, 503, 506-548, 550, 551-552, 556, 558, 565, 567, 569-570, 572-578, 582, 584, 586, 588, 591, 593-595, 597, 600, 602, 604, 605, 718, 755, 784, 786, 790-792, 794, 795, 798, 800, 801, 803, 804, 806-810, 812-821, 823, 825, 827-836, 838, 839, 841-868, 870-874, 875-879, 881, 883, 913-932, 939-941, 944, 945, 946, and 948.

51. A host cell that comprises a heterologous polynucleotide encoding a terminal synthase (TS), wherein the TS comprises a sequence that is at least 98% identical to SEQ ID NO: 36, wherein the host cell is capable of producing a CBD-type cannabinoid.

52. The host cell of claim 51, wherein the CBD-type cannabinoid is CBDA and/or CBDVA.

53. The host cell of claim 51 or 52, wherein the TS is capable of producing more of a CBD-type cannabinoid than a control TS, wherein the control TS comprises the sequence of SEQ ID NO: 136.

54. The host cell of any one of claims 51-53, wherein the TS is capable of producing at least 0.05%, 0.075%, 0.1%, 0.5%, 0.75%, 1%, 5%, 10%, 20%, 30%, 40%, 50%, 60%, 70%, 80%, 90%, 120%, 150%, 170%, 200%, 240%, 290%, or 300% more of a CBD-type cannabinoid than a control TS, wherein the control TS comprises the sequence of SEQ ID NO: 136.

55. The host cell of any one of claims 34-54, wherein the TS further comprises a first signal peptide.

56. The host cell of claim 55, wherein the first signal peptide comprises SEQ ID NO: 16 or a sequence that has no more than two amino acid substitutions, insertions, additions, or deletions relative to the sequence of SEQ ID NO: 16.

57. The host cell of claim 55 or 56, wherein the first signal peptide is located at the amino terminus of the TS.

58. The host cell of claim 56 or 57, wherein a methionine residue is added to the N-terminus of SEQ ID NO: 16.

59. The host cell of any one of claims 55-58, wherein the TS further comprises a second signal peptide.

60. The host cell of claim 59, wherein the second signal peptide comprises SEQ ID NO: 17 or a sequence that has no more than one amino acid substitution, insertion, addition, or deletion relative to the sequence of SEQ ID NO: 17.

61. The host cell of claim 59 or 60, wherein the second signal peptide is located at the carboxyl terminus of the TS.

62. The host cell of any one of claims 34-61, wherein the host cell further produces one or more of THCA, THCVA, CBCA and/or CBCVA.

63. The host cell of any one of claims 34-62, wherein the TS produces a higher ratio of CBDA:THCA, CBDA:CBCA, CBDVA: THCVA and/or CBCVA:THCVA than a control TS.

64. The host cell of claim 63, wherein the control TS is a TS comprising the sequence of SEQ ID NO: 136.

65. The host cell of any one of 34-64, wherein the TS has a higher product specificity for a CBD-type cannabinoid than a control TS.

66. The host cell of claim 65, wherein the control TS is a TS comprising the sequence of SEQ ID NO: 136.

67. A host cell that comprises a heterologous polynucleotide encoding a terminal synthase (TS), wherein relative to the sequence of SEQ ID NO: 14, the TS comprises an amino acid substitution at one or more residues corresponding to positions 41, 47, 49, 51, 52, 56, 58, 61, 63, 95, 96, 103, 116, 129, 136, 143, 158, 173, 181, 237, 242, 247, 257, 268, 273, 296, 302, 309, 311, 340, 344, 345, 351, 354, 360, 361, 363, 377, 378, 379, 382, 396, 411, 424, 425, 430, 442, 443, 446, 447, 459, 462,464, 465, 469, 475, 479, 489, 491, 492, 493, 494, 496, 516, 524, 528, 542, 543, and/or 544 in SEQ ID NO: 14, and wherein the TS is capable of producing a CBC-type cannabinoid.

68. The host cell of claim 67, wherein relative to the sequence of SEQ ID NO: 14, the TS further comprises an amino acid substitution at one or more residues corresponding to positions 31, 40, 46, 74, 90, 255, 288, 290, 318, and/or 495 in SEQ ID NO: 14.

69. The host cell of claim 67 or 68, wherein the TS is capable of producing more of a CBC-type cannabinoid than a control TS, and wherein the control TS comprises the sequence of SEQ ID NO: 21.

70. A host cell that comprises a heterologous polynucleotide encoding a terminal synthase (TS), wherein relative to the sequence of SEQ ID NO: 14, the TS comprises an amino acid substitution at one or more residues corresponding to positions 31, 40, 41, 46, 47, 49, 51, 52, 56, 58, 61, 63, 74, 90, 95, 96, 103, 116, 129, 136, 143, 158, 173, 181, 237, 242, 247, 255, 257, 268, 273, 288, 290, 296, 302, 309, 311, 318, 340, 344, 345, 351, 354, 360, 361, 363, 377, 378, 379, 382, 396, 411, 424, 425, 430, 442, 443, 446, 447, 459, 462, 464, 465, 469, 475, 479, 489, 491, 492, 493, 494, 495, 496, 516, 524, 528, 542, 543, and/or 544 in SEQ ID NO. 14, wherein the TS is capable of producing more of a CBC-type cannabinoid than a control TS, and wherein the control TS comprises the sequence of SEQ ID NO: 21.

71. The host cell of any one of claims 67-69, wherein the CBC-type cannabinoid is CBCA and/or CBCVA.

72. The host cell of any one of claims 67-71, wherein the TS is capable of producing at least 0.05%, 0.075%, 0.1%, 0.5%, 0.75%, 1%, 5%, 10%, 20%, 30%, 40%, 50%, 60%, 70%, 80%, 90%, 120%, 150%, 170%, 200%, 240%, 290%, or 300% more of a CBC-type cannabinoid than a control TS, wherein the control TS comprises the sequence of SEQ ID NO: 21.

73. The host cell of any one of claims 67-72, wherein the TS is capable of producing at least 1, 2, 3, or 4-fold more of a CBC-type cannabinoid than a control TS, wherein the control TS comprises the sequence of SEQ ID NO: 21.

74. The host cell of any one of claims 68-73, wherein the TS comprises:
(i) the amino acid Q at a residue corresponding to position 31 in SEQ ID NO: 14;
(ii) the amino acid E at a residue corresponding to position 40 in SEQ ID NO: 14;
(iii) the amino acid Y at a residue corresponding to position 41 in SEQ ID NO: 14;
(iv) the amino acid P at a residue corresponding to position 46 in SEQ ID NO: 14,
(v) the amino acid T at a residue corresponding to position 47 in SEQ ID NO: 14;
(vi) the amino acid A at a residue corresponding to position 49 in SEQ ID NO: 14;
(vii) the amino acid F at a residue corresponding to position 51 in SEQ ID NO: 14;
(viii) the amino acid I at a residue corresponding to position 52 in SEQ ID NO: 14;
(ix) the amino acid N at a residue corresponding to position 56 in SEQ ID NO: 14;
(x) the amino acid S at a residue corresponding to position 58 in SEQ ID NO: 14;
(xi) the amino acid S at a residue corresponding to position 61 in SEQ ID NO: 14;
(xii) the amino acid V or L at a residue corresponding to position 63 in SEQ ID NO: 14;
(xiii) the amino acid T at a residue corresponding to position 74 in SEQ ID NO: 14;
(xiv) the amino acid V at a residue corresponding to position 90 in SEQ ID NO: 14;
(xv) the amino acid G at a residue corresponding to position 95 in SEQ ID NO: 14;
(xvi) the amino acid S at a residue corresponding to position 96 in SEQ ID NO: 14;
(xvii) the amino acid I at a residue corresponding to position 103 in SEQ ID NO: 14;
(xviii) the amino acid S at a residue corresponding to position 116 in SEQ ID NO: 14;
(xix) the amino acid I at a residue corresponding to position 129 in SEQ ID NO: 14;
(xx) the amino acid R at a residue corresponding to position 136 in SEQ ID NO: 14;
(xxi) the amino acid E at a residue corresponding to position 143 in SEQ ID NO: 14;
(xxii) the amino acid L at a residue corresponding to position 158 in SEQ ID NO: 14;
(xxiii) the amino acid A at a residue corresponding to position 173 in SEQ ID NO: 14;
(xxiv) the amino acid A at a residue corresponding to position 181 in SEQ ID NO: 14;
(xxv) the amino acid S at a residue corresponding to position 237 in SEQ ID NO: 14;
(xxvi) the amino acid V at a residue corresponding to position 242 in SEQ ID NO: 14;
(xxvii) the amino acid R at a residue corresponding to position 247 in SEQ ID NO: 14;
(xxviii) the amino acid V at a residue corresponding to position 255 in SEQ ID NO: 14;
(xxix) the amino acid M at a residue corresponding to position 257 in SEQ ID NO: 14;
(xxx) the amino acid E at a residue corresponding to position 268 in SEQ ID NO: 14;
(xxxi) the amino acid V at a residue corresponding to position 273 in SEQ ID NO: 14;
(xxxii) the amino acid L at a residue corresponding to position 288 in SEQ ID NO: 14;
(xxxiii) the amino acid F at a residue corresponding to position 290 in SEQ ID NO: 14;
(xxxiv) the amino acid R at a residue corresponding to position 296 in SEQ ID NO: 14;
(xxxv) the amino acid Q at a residue corresponding to position 302 in SEQ ID NO: 14;
(xxxvi) the amino acid I at a residue corresponding to position 309 in SEQ ID NO: 14;
(xxxvii) the amino acid S at a residue corresponding to position 311 in SEQ ID NO: 14;
(xxxviii) the amino acid L at a residue corresponding to position 318 in SEQ ID NO: 14;
(xxxix) the amino acid E at a residue corresponding to position 340 in SEQ ID NO: 14;
(xl) the amino acid Q at a residue corresponding to position 344 in SEQ ID NO: 14;
(xli) the amino acid L at a residue corresponding to position 345 in SEQ ID NO: 14;
(xlii) the amino acid I at a residue corresponding to position 351 in SEQ ID NO: 14;
(xliii) the amino acid F at a residue corresponding to position 354 in SEQ ID NO: 14;
(xliv) the amino acid Y at a residue corresponding to position 360 in SEQ ID NO: 14;
(xlv) the amino acid D at a residue corresponding to position 361 in SEQ ID NO: 14;
(xlvi) the amino acid T at a residue corresponding to position 363 in SEQ ID NO: 14;
(xlvii) the amino acid Q at a residue corresponding to position 377 in SEQ ID NO: 14;
(xlviii) the amino acid N at a residue corresponding to position 378 in SEQ ID NO: 14;
(xlix) the amino acid A at a residue corresponding to position 379 in SEQ ID NO: 14;
(l) the amino acid S at a residue corresponding to position 382 in SEQ ID NO: 14;
(li) the amino acid V at a residue corresponding to position 396 in SEQ ID NO: 14;
(lii) the amino acid V at a residue corresponding to position 411 in SEQ ID NO: 14;
(liii) the amino acid D at a residue corresponding to position 424 in SEQ ID NO: 14;
(liv) the amino acid K at a residue corresponding to position 425 in SEQ ID NO: 14;
(lv) the amino acid T at a residue corresponding to position 430 in SEQ ID NO: 14;
(lvi) the amino acid I at a residue corresponding to position 442 in SEQ ID NO: 14;
(lvii) the amino acid I or V at a residue corresponding to position 443 in SEQ ID NO: 14;
(lviii) the amino acid I at a residue corresponding to position 446 in SEQ ID NO: 14;
(lix) the amino acid C at a residue corresponding to position 447 in SEQ ID NO: 14;
(lx) the amino acid L at a residue corresponding to position 459 in SEQ ID NO: 14;
(lxi) the amino acid I at a residue corresponding to position 462 in SEQ ID NO: 14;
(lxii) the amino acid N at a residue corresponding to position 464 in SEQ ID NO: 14;
(lxiii) the amino acid I at a residue corresponding to position 465 in SEQ ID NO: 14;
(lxiv) the amino acid M at a residue corresponding to position 469 in SEQ ID NO: 14;
(lxv) the amino acid K at a residue corresponding to position 475 in SEQ ID NO: 14;
(lxvi) the amino acid M at a residue corresponding to position 479 in SEQ ID NO: 14;
(lxvii) the amino acid I at a residue corresponding to position 489 in SEQ ID NO: 14;
(lxviii) the amino acid I at a residue corresponding to position 491 in SEQ ID NO: 14;
(lxix) the amino acid N at a residue corresponding to position 492 in SEQ ID NO: 14;
(lxx) the amino acid D at a residue corresponding to position 493 in SEQ ID NO: 14;
(lxxi) the amino acid F or P at a residue corresponding to position 494 in SEQ ID NO: 14;
(lxxii) the amino acid E or K at a residue corresponding to position 495 in SEQ ID NO: 14;
(lxxiii) the amino acid N at a residue corresponding to position 496 in SEQ ID NO: 14;
(lxxiv) the amino acid D at a residue corresponding to position 516 in SEQ ID NO: 14;
(lxxv) the amino acid L at a residue corresponding to position 524 in SEQ ID NO: 14;
(lxxvi) the amino acid D at a residue corresponding to position 528 in SEQ ID NO: 14;
(lxxvii) the amino acid L or R at a residue corresponding to position 542 in SEQ ID NO: 14;
(lxxviii) the amino acid R at a residue corresponding to position 543 in SEQ ID NO: 14; and/or
(lxxix) the amino acid R at a residue corresponding to position 544 in SEQ ID NO: 14.

75. The host cell of any one of claims 67-73, wherein the TS comprises:
(i) the amino acid Y at a residue corresponding to position 41 in SEQ ID NO: 14;
(ii) the amino acid T at a residue corresponding to position 47 in SEQ ID NO: 14;
(iii) the amino acid A at a residue corresponding to position 49 in SEQ ID NO: 14;
(iv) the amino acid F at a residue corresponding to position 51 in SEQ ID NO: 14,
(v) the amino acid I at a residue corresponding to position 52 in SEQ ID NO: 14;
(vi) the amino acid N at a residue corresponding to position 56 in SEQ ID NO: 14;
(vii) the amino acid S at a residue corresponding to position 58 in SEQ ID NO: 14;
(viii) the amino acid S at a residue corresponding to position 61 in SEQ ID NO: 14;
(ix) the amino acid V or L at a residue corresponding to position 63 in SEQ ID NO: 14;
(x) the amino acid G at a residue corresponding to position 95 in SEQ ID NO: 14;
(xi) the amino acid S at a residue corresponding to position 96 in SEQ ID NO: 14;
(xii) the amino acid I at a residue corresponding to position 103 in SEQ ID NO: 14;
(xiii) the amino acid S at a residue corresponding to position 116 in SEQ ID NO: 14;
(xiv) the amino acid I at a residue corresponding to position 129 in SEQ ID NO: 14;
(xv) the amino acid R at a residue corresponding to position 136 in SEQ ID NO: 14;
(xvi) the amino acid E at a residue corresponding to position 143 in SEQ ID NO: 14;
(xvii) the amino acid L at a residue corresponding to position 158 in SEQ ID NO: 14;
(xviii) the amino acid A at a residue corresponding to position 173 in SEQ ID NO: 14;
(xix) the amino acid A at a residue corresponding to position 181 in SEQ ID NO: 14;
(xx) the amino acid S at a residue corresponding to position 237 in SEQ ID NO: 14;
(xxi) the amino acid V at a residue corresponding to position 242 in SEQ ID NO: 14;
(xxii) the amino acid R at a residue corresponding to position 247 in SEQ ID NO: 14;
(xxiii) the amino acid M at a residue corresponding to position 257 in SEQ ID NO: 14;
(xxiv) the amino acid E at a residue corresponding to position 268 in SEQ ID NO: 14;
(xxv) the amino acid V at a residue corresponding to position 273 in SEQ ID NO: 14;
(xxvi) the amino acid R at a residue corresponding to position 296 in SEQ ID NO: 14;
(xxvii) the amino acid Q at a residue corresponding to position 302 in SEQ ID NO: 14;
(xxviii) the amino acid I at a residue corresponding to position 309 in SEQ ID NO: 14;
(xxix) the amino acid S at a residue corresponding to position 311 in SEQ ID NO: 14;
(xxx) the amino acid E at a residue corresponding to position 340 in SEQ ID NO: 14;
(xxxi) the amino acid Q at a residue corresponding to position 344 in SEQ ID NO: 14;
(xxxii) the amino acid L at a residue corresponding to position 345 in SEQ ID NO: 14;
(xxxiii) the amino acid I at a residue corresponding to position 351 in SEQ ID NO: 14;
(xxxiv) the amino acid F at a residue corresponding to position 354 in SEQ ID NO: 14;
(xxxv) the amino acid Y at a residue corresponding to position 360 in SEQ ID NO: 14;
(xxxvi) the amino acid D at a residue corresponding to position 361 in SEQ ID NO: 14;
(xxxvii) the amino acid T at a residue corresponding to position 363 in SEQ ID NO: 14;
(xxxviii) the amino acid Q at a residue corresponding to position 377 in SEQ ID NO: 14;
(xxxix) the amino acid N at a residue corresponding to position 378 in SEQ ID NO: 14;
(xl) the amino acid A at a residue corresponding to position 379 in SEQ ID NO: 14;
(xli) the amino acid S at a residue corresponding to position 382 in SEQ ID NO: 14;
(xlii) the amino acid V at a residue corresponding to position 396 in SEQ ID NO: 14;
(xliii) the amino acid V at a residue corresponding to position 411 in SEQ ID NO: 14;
(xliv) the amino acid D at a residue corresponding to position 424 in SEQ ID NO: 14;
(xlv) the amino acid K at a residue corresponding to position 425 in SEQ ID NO: 14;
(xlvi) the amino acid T at a residue corresponding to position 430 in SEQ ID NO: 14;
(xlvii) the amino acid I at a residue corresponding to position 442 in SEQ ID NO: 14;
(xlviii) the amino acid I or V at a residue corresponding to position 443 in SEQ ID NO: 14;
(xlix) the amino acid I at a residue corresponding to position 446 in SEQ ID NO: 14;
(l) the amino acid C at a residue corresponding to position 447 in SEQ ID NO: 14;
(li) the amino acid L at a residue corresponding to position 459 in SEQ ID NO: 14;
(lii) the amino acid I at a residue corresponding to position 462 in SEQ ID NO: 14;
(liii) the amino acid N at a residue corresponding to position 464 in SEQ ID NO: 14;
(liv) the amino acid I at a residue corresponding to position 465 in SEQ ID NO: 14;
(lv) the amino acid M at a residue corresponding to position 469 in SEQ ID NO: 14;
(lvi) the amino acid K at a residue corresponding to position 475 in SEQ ID NO: 14;
(lvii) the amino acid M at a residue corresponding to position 479 in SEQ ID NO: 14;
(lviii) the amino acid I at a residue corresponding to position 489 in SEQ ID NO: 14;
(lix) the amino acid I at a residue corresponding to position 491 in SEQ ID NO: 14;
(lx) the amino acid N at a residue corresponding to position 492 in SEQ ID NO: 14;
(lxi) the amino acid D at a residue corresponding to position 493 in SEQ ID NO: 14;
(lxii) the amino acid F or P at a residue corresponding to position 494 in SEQ ID NO: 14;
(lxiii) the amino acid N at a residue corresponding to position 496 in SEQ ID NO: 14;
(lxiv) the amino acid D at a residue corresponding to position 516 in SEQ ID NO: 14;
(lxv) the amino acid L at a residue corresponding to position 524 in SEQ ID NO: 14;
(lxvi) the amino acid D at a residue corresponding to position 528 in SEQ ID NO: 14;
(lxvii) the amino acid L or R at a residue corresponding to position 542 in SEQ ID NO: 14;
(lxviii) the amino acid R at a residue corresponding to position 543 in SEQ ID NO: 14; and/or
(lxix) the amino acid R at a residue corresponding to position 544 in SEQ ID NO: 14.

76. The host cell of any one of claims 68-74, wherein the TS comprises at least 2, 3, 4, 5, 6, 7, 8, 9, 10, 11, 12, 13, 14, 15, or 16 amino acid substitutions at residues corresponding to positions 31, 40, 41, 46, 47, 49, 51, 52, 56, 58, 61, 63, 74, 90, 95, 96, 103, 116, 129, 136, 143, 158, 173, 181, 237, 242, 247, 255, 257, 268, 273, 288, 290, 296, 302, 309, 311, 318, 340, 344, 345, 351, 354, 360, 361, 363, 377, 378, 379, 382, 396, 411, 424, 425, 430, 442, 443, 446, 447, 459,462, 464, 465, 469, 475,479, 489, 491, 492, 493, 494,495, 496, 516, 524, 528, 542, 543, and/or 544 in SEQ ID NO: 14.

77. The host cell of any one of claims 67-75, wherein the TS comprises at least 2, 3, 4, 5, 6, 7, 8, 9, 10, 11, 12, 13, 14, 15, or 16 amino acid substitutions at residues corresponding to positions 41, 47, 49, 51, 52, 56, 58, 61, 63, 95, 96, 103, 116, 129, 136, 143, 158, 173, 181, 237, 242, 247, 257, 268, 273, 296, 302, 309, 311, 340, 344, 345, 351, 354, 360, 361, 363, 377, 378, 379, 382, 396, 411, 424, 425, 430, 442, 443, 446, 447, 459, 462, 464, 465, 469, 475, 479, 489, 491, 492, 493, 494, 496, 516, 524, 528, 542, 543, and/or 544 in SEQ ID NO: 14.

78. The host cell of claim 76, where the TS comprises relative to SEQ ID NO: 14:
(i) Q58S, V288L, and F345L;
(ii) R31Q, V52I, H56N, Q58S, M61S, I74T, N90V, A250P, S255V, F345L, Q475K, and T492N;
(iii) R31Q, H56N, I74T, N90V, H143E, A250P, S255V, Q475K, and T492N;
(iv) R31Q, H56N, I74T, N90V, A250P, S255V, L443I, Q475K, and T492N;
(v) H56N, M61S, N90V, A250D, S255V, V288L, Q475K, T492N, and A495E;
(vi) R31Q, H56N, I74T, N90V, K215R, A250P, S255V, Q475K, and T492N;
(vii) R31Q, P49A, H56N, Q58S, M61 S, I74T, N90V, H143E, A250P, S255V, V288L, F345L, Q475K, and T492N;
(viii) R31Q, A47T, H56N, 174T, N90V, A250P, S255V, Q475K, and T492N;
(ix) M61S, N90V, A250D, S255V, Q475K, T492N, A495E, and N498T;
(x) R31Q, H56N, M61S, I74T, N89H, N90V, S100A, H136R, E150Q, N196K, N211D, A250P, S255V, V288M, F345M, S382K, L443I, Q475K, and T492N;
(xi) R31Q, H56N, Q58S, M61S, I74T, N90V, H143E, A250P, S255V, V288L, T340E, F345L, E424D, Q475K, and T492N;
(xii) R31Q, H56N, I74T, S88L, N90V, A250P, S255V, Q475K, and T492N;
(xiii) R31Q, V52I, H56N, Q58S, M61S, I74T, N90V, H143E, A250P, S255V, V288L, F345L, Q475K, and T492N;
(xiv) R31Q, H56N, Q58S, M61S, 174T, N90V, H143E, A250P, S255V, V288L, T340E, F345L, E424D, Q475K, and T492N;
(xv) R31Q, H56N, Q58S, M61S, I74T, N90V, H143E, A250P, S255V, V288L, F345L, A411V, Q475K, and T492N;
(xvi) R31Q, V52L, H56N, Q58S, M61S, I74T, N90V, A250P, S255V, V288L, F345L, Q475K, and T492N;
(xvii) R31Q, K50L, H56N, I74T, N90V, A250P, S255V, Q475K, and T492N;
(xviii) R31Q, A47T, V52I, H56N, Q58S, M61S, 174T, N90V, H143E, A250P, S255V, V288L, T340E, F345L, Q475K, and T492N; or
(xix) R31Q, H56N, M61S, I74T, N89H, N90V, S100A, N196K, N211D, A250P, S255V, I257R, V288M, F345M, S382K, L443I, Q475K, and T492N.

79. The host cell of any one of claims 67-78, wherein the TS comprises a sequence that is at least 90%, at least 95%, at least 97%, at least 98%, or at least 99% identical to any one of SEQ ID NOs: 137-140, 142-143, 145-150, 154, 157, 159, 161, 162, 164, 167, 169, 173, 174, 177-193, 195, 196, 199, 204-206, 464-466, 488, 489, 492-498, 500, 502, 503, 506, 507-548, 550, 551, 552, 565, 574, 595, 597, 602, 698-882, and 993.

80. The host cell of claim 79, wherein the TS comprises a sequence that is at least 90%, at least 95%, at least 97%, at least 98%, or at least 99% identical to any one of SEQ ID NOs: 698-716.

81. The host cell of claim 79, wherein the TS comprises the sequence of any one of SEQ ID NOs: 137-140, 142-143, 145-150, 154, 157, 159, 161, 162, 164, 167, 169, 173, 174, 177-193, 195, 196, 199, 204-206, 464-466, 488, 489, 492-498, 500, 502, 503, 506, 507-548, 550, 551, 552, 565, 574, 595, 597, 602, 698-882, and 993.

82. A host cell that comprises a heterologous polynucleotide encoding a terminal synthase (TS), wherein the TS comprises a sequence that is at least 98% identical to SEQ ID NO: 39, and wherein the host cell is capable of producing a CBC-type cannabinoid.

83. The host cell of claim 82, wherein the CBC-type cannabinoid is CBCA and/or CBCVA.

84. The host cell of claim 82 or 83, wherein the TS is capable of producing more of a CBC-type cannabinoid than a control TS, wherein the control TS comprises the sequence of SEQ ID NO: 21.

85. The host cell of any one of claims 82-84, wherein the TS is capable of producing at least 0.05%, 0.075%, 0.1%, 0.5%, 0.75%, 1%, 5%, 10%, 20%, 30%, 40%, 50%, 60%, 70%, 80%, 90%, 120%, 150%, 170%, 200%, 240%, 290%, or 300/a more of a CBC-type cannabinoid than a control TS, wherein the control TS comprises the sequence of SEQ ID NO: 21.

86. The host cell of any one of claims 67-85, wherein the TS further comprises a first signal peptide.

87. The host cell of claim 86, wherein the first signal peptide comprises SEQ ID NO: 16 or a sequence that has no more than two amino acid substitutions, insertions, additions, or deletions relative to the sequence of SEQ ID NO: 16.

88. The host cell of claim 86 or 87, wherein the first signal peptide is located at the amino terminus of the TS.

89. The host cell of claim 87 or 88, wherein a methionine residue is added to the N-terminus of SEQ ID NO: 16.

90. The host cell of any one of claims 86-89, wherein the TS further comprises a second signal peptide.

91. The host cell of claim 90, wherein the second signal peptide comprises SEQ ID NO: 17 or a sequence that has no more than one amino acid substitution, insertion, addition, or deletion relative to the sequence of SEQ ID NO: 17.

92. The host cell of claim 90 or 91, wherein the second signal peptide is located at the carboxyl terminus of the TS.

93. The host cell of any one of claims 67-92, wherein the host cell further produces one or more of THCA, THCVA, CBDA and/or CBDVA.

94. The host cell of any one of claims 67-93, wherein the TS produces a higher ratio of CBCA:THCA, CBCA:CBDA, CBCVA:THCVA, and/or CBCVA:CBDVA than a control TS.

95. The host cell of claim 94, wherein the control TS is a TS comprising the sequence of SEQ ID NO: 21.

96. The host cell of any one of 67-95, wherein the TS has a higher product specificity for a THC-type cannabinoid than a control TS.

97. The host cell of claim 96, wherein the control TS is a TS comprising the sequence of SEQ ID NO: 21.

98. The host cell of any one of claims 1-97, wherein the host cell is a plant cell, an algal cell, a yeast cell, a bacterial cell, or an animal cell.

99. The host cell of claim 98, wherein the host cell is a yeast cell.

100. The host cell of claim 99, wherein the yeast cell is a Saccharomyces cell, a Yarrowia cell, a Komagataella cell, or a Pichia cell.

101. The host cell of claim 100, wherein the Saccharomyces cell is a Saccharomyces cerevisiae cell.

102. The host cell of claim 100, wherein the yeast cell is a Yarrowia cell.

103. The host cell of claim 98, wherein the host cell is a bacterial cell.

104. The host cell of claim 103, wherein the bacterial cell is an E. coli cell.

105. The host cell of any one of claims 98-104, wherein the host cell further comprises one or more heterologous polynucleotides encoding one or more of: an acyl activating enzyme (AAE), a polyketide synthase (PKS), a polyketide cyclase (PKC), a prenyltransferase (PT), and/or an additional terminal synthase (TS).

106. The host cell of claim 105, wherein the PKS is an olivetol synthase (OLS) or a divarinol synthase.

107. A method comprising culturing the host cell of any one of claims 1-106.

108. A method for producing a cannabinoid comprising contacting a CBG-type cannabinoid with a terminal synthase (TS), wherein relative to the sequence of SEQ ID NO: 14, the TS comprises an amino acid substitution at one or more residues corresponding to positions 36, 44, 47, 52, 58, 76, 85, 88, 89, 95, 129, 136, 150, 158, 181, 211, 237, 242, 247, 255, 267, 268, 273, 274, 288, 302, 309, 318, 329, 340, 344, 345, 351, 360, 361, 363, 379, 382, 396, 419, 424, 443, 459, 462, 464, 469, 479, 475, 491, 492, and/or 499 in SEQ ID NO: 14.

109. A method for producing a cannabinoid comprising contacting a CBG-type cannabinoid with a terminal synthase (TS), wherein relative to the sequence of SEQ ID NO: 14, the TS comprises an amino acid substitution at one or more residues corresponding to positions 31, 36, 40, 41, 44, 46, 47, 49, 51, 52, 56, 58, 59, 61, 63, 74, 76, 85, 88, 89, 90, 95, 96, 100, 103, 116, 129,136, 143, 150, 158, 173, 181, 196, 211, 237, 242, 247, 250, 255, 257, 267, 268, 273, 274, 288, 290, 296, 302, 309, 311, 318, 329, 340, 344, 345, 351, 354, 360, 361, 363, 377, 378, 379, 382, 396, 411, 417, 419, 424, 443, 446, 459, 462, 464, 469, 479, 475, 491, 492, 494, 495, 499, 528, 542, 543, and/or 544 in SEQ ID NO: 14, wherein the TS does not comprise SEQ ID NO: 20, 21, 320 or 321, wherein the TS is capable of producing more of a THC-type cannabinoid than a control TS, and wherein the control TS comprises the sequence of SEQ ID NO: 284 or SEQ ID NO: 21.

110. A method for producing a cannabinoid comprising contacting a CBG-type cannabinoid with a terminal synthase (TS), wherein relative to the sequence of SEQ ID NO: 13, the TS comprises an amino acid substitution at one or more residues corresponding to positions 79, 90, 106, 150, 166, 184, 211, 216, 230, 263, 273, 283, 290, 292, 319, 322, 339, 353, 380, 386, 397, 407, 416, 418, 441, 442, 446, 479, 450, 452, 454, 467, 481, 486, 504, and/or 512 in SEQ ID NO: 13.

111. A method for producing a cannabinoid comprising contacting a CBG-type cannabinoid with a terminal synthase (TS), wherein relative to the sequence of SEQ ID NO: 13, the TS comprises an amino acid substitution at one or more residues corresponding to positions 31, 47, 49, 50, 56, 57, 58, 69, 79, 89, 90, 95, 100, 103, 106, 116, 124, 143, 150, 162, 166, 167, 168, 171, 172, 175, 180, 184, 196, 211, 213, 216, 230, 250, 263, 273, 283, 287, 290, 292, 319, 322, 339, 343, 344, 353, 376, 377, 378, 380, 386, 394, 397, 407, 410, 414, 415, 416, 418, 441, 442, 445, 446, 479, 450, 452, 454, 467, 481, 486, 490, 492, 504, 512, 527 and/or 542 in SEQ ID NO: 13, wherein the TS is capable of producing more of a CBD-type cannabinoid than a control TS, and wherein the control TS comprises the sequence of SEQ ID NO: 136.

112. A method for producing a cannabinoid comprising contacting a CBG-type cannabinoid with a terminal synthase (TS), wherein relative to the sequence of SEQ ID NO: 14, the TS comprises an amino acid substitution at one or more residues corresponding to positions 41, 47, 49, 51, 52, 56, 58, 61, 63, 95, 96, 103, 116, 129, 136, 143, 158, 173, 181, 237, 242, 247, 257, 268, 273, 296, 302, 309, 311, 340, 344, 345, 351, 354, 360, 361, 363, 377, 378, 379, 382, 396, 411, 424, 425, 430, 442, 443, 446, 447, 459, 462, 464, 465, 469, 475, 479, 489, 491, 492, 493, 494, 496, 516, 524, 528, 542, 543, and/or 544 in SEQ ID NO: 14 and wherein the TS is capable of producing a CBC-type cannabinoid.

113. A method for producing a cannabinoid comprising contacting a CBG-type cannabinoid with a terminal synthase (TS), wherein relative to the sequence of SEQ ID NO: 14, the TS comprises an amino acid substitution at one or more residues corresponding to positions 31, 40, 41, 46, 47, 49, 51, 52, 56, 58, 61, 63, 74, 90, 95, 96, 103, 116, 129, 136, 143, 158, 173, 181, 237, 242, 247, 255, 257, 268, 273, 288, 290, 296, 302, 309, 311, 318, 340, 344, 345, 351, 354, 360, 361, 363, 377, 378, 379, 382, 396, 411, 424, 425, 430, 442, 443, 446, 447, 459, 462, 464, 465, 469, 475, 479, 489, 491, 492, 493, 494, 495, 496, 516, 524, 528, 542, 543, and/or 544 in SEQ ID NO: 14, wherein the TS is capable of producing more of a CBC-type cannabinoid than a control TS, and wherein the control TS comprises the sequence of SEQ ID NO: 21.

114. The method of any one of claims 108-113, wherein contacting the CBG-type cannabinoid with the TS occurs in vitro.

115. The method of any one of claims 108-113, wherein contacting the CBG-type cannabinoid with the TS occurs in vivo.

116. The method of claim 115, wherein contacting the CBG-type cannabinoid with the TS occurs in a host cell.

117. A non-naturally occurring terminal synthase (TS), wherein relative to the sequence of SEQ ID NO: 14, the TS comprises an amino acid substitution at one or more residues corresponding to positions 36, 44, 47, 52, 58, 76, 85, 88, 89, 95, 129, 136, 150, 158, 181, 211, 237, 242, 247, 255, 267, 268, 273, 274, 288, 302, 309, 318, 329, 340, 344, 345, 351, 360, 361, 363, 379, 382, 396, 419, 424, 443, 459, 462, 464, 469, 479, 475, 491, 492, and/or 499 in SEQ ID NO: 14, and wherein the TS is capable of producing a THC-type cannabinoid.

118. The non-naturally occurring TS of claim 117, wherein relative to the sequence of SEQ ID NO: 14, the TS further comprises an amino acid substitution at one or more residues corresponding to positions 31, 40, 41, 46, 49, 51, 56, 59, 61, 63, 74, 90, 96, 100, 103, 116, 143, 173, 196, 250, 257, 290, 296, 311, 354, 377, 378, 411, 417, 446, 494, 495, 528, 542, 543 and/or 544 in SEQ ID NO: 14.

119. The non-naturally occurring TS of claim 118, wherein the TS comprises:
(i) the amino acid Q at a residue corresponding to position 31 in SEQ ID NO: 14;
(ii) the amino acid H or Q at a residue corresponding to position 36 in SEQ ID NO: 14;
(iii) the amino acid E or Q at a residue corresponding to position 40 in SEQ ID NO: 14;
(iv) the amino acid Y at a residue corresponding to position 41 in SEQ ID NO: 14;
(v) the amino acid T at a residue corresponding to position 44 in SEQ ID NO: 14,
(vi) the amino acid A or P at a residue corresponding to position 46 in SEQ ID NO: 14;
(vii) the amino acid T at a residue corresponding to position 47 in SEQ ID NO: 14;
(viii) the amino acid A at a residue corresponding to position 49 in SEQ ID NO: 14;
(ix) the amino acid F at a residue corresponding to position 51 in SEQ ID NO: 14;
(x) the amino acid I at a residue corresponding to position 52 in SEQ ID NO: 14;
(xi) the amino acid N at a residue corresponding to position 56 in SEQ ID NO: 14;
(xii) the amino acid P or S at a residue corresponding to position 58 in SEQ ID NO: 14;
(xiii) the amino acid F at a residue corresponding to position 59 in SEQ ID NO: 14;
(xiv) the amino acid S at a residue corresponding to position 61 in SEQ ID NO: 14;
(xv) the amino acid L or V at a residue corresponding to position 63 in SEQ ID NO: 14;
(xvi) the amino acid T at a residue corresponding to position 74 in SEQ ID NO: 14;
(xvii) the amino acid N at a residue corresponding to position 76 in SEQ ID NO: 14;
(xviii) the amino acid I at a residue corresponding to position 85 in SEQ ID NO: 14;
(xix) the amino acid L at a residue corresponding to position 88 in SEQ ID NO: 14;
(xx) the amino acid D, E, or H at a residue corresponding to position 89 in SEQ ID NO: 14;
(xxi) the amino acid E or V at a residue corresponding to position 90 in SEQ ID NO: 14;
(xxii) the amino acid G at a residue corresponding to position 95 in SEQ ID NO: 14;
(xxiii) the amino acid S at a residue corresponding to position 96 in SEQ ID NO: 14;
(xxiv) the amino acid A at a residue corresponding to position 100 in SEQ ID NO: 14;
(xxv) the amino acid I at a residue corresponding to position 103 in SEQ ID NO: 14;
(xxvi) the amino acid S at a residue corresponding to position 116 in SEQ ID NO: 14;
(xxvii) the amino acid I at a residue corresponding to position 129 in SEQ ID NO: 14;
(xxviii) the amino acid R at a residue corresponding to position 136 in SEQ ID NO: 14;
(xxix) the amino acid E at a residue corresponding to position 143 in SEQ ID NO: 14;
(xxx) the amino acid Q at a residue corresponding to position 150 in SEQ ID NO: 14;
(xxxi) the amino acid L at a residue corresponding to position 158 in SEQ ID NO: 14;
(xxxii) the amino acid A at a residue corresponding to position 173 in SEQ ID NO: 14;
(xxxiii) the amino acid A at a residue corresponding to position 181 in SEQ ID NO: 14;
(xxxiv) the amino acid K at a residue corresponding to position 196 in SEQ ID NO: 14;
(xxxv) the amino acid D at a residue corresponding to position 211 in SEQ ID NO: 14;
(xxxvi) the amino acid S at a residue corresponding to position 237 in SEQ ID NO: 14;
(xxxvii) the amino acid V at a residue corresponding to position 242 in SEQ ID NO: 14;
(xxxviii) the amino acid R at a residue corresponding to position 247 in SEQ ID NO: 14;
(xxxix) the amino acid D or P at a residue corresponding to position 250 in SEQ ID NO: 14;
(xl) the amino acid V at a residue corresponding to position 255 in SEQ ID NO: 14;
(xli) the amino acid M or R at a residue corresponding to position 257 in SEQ ID NO: 14;
(xlii) the amino acid N at a residue corresponding to position 267 in SEQ ID NO: 14;
(xliii) the amino acid E at a residue corresponding to position 268 in SEQ ID NO: 14;
(xliv) the amino acid V at a residue corresponding to position 273 in SEQ ID NO: 14;
(xlv) the amino acid H at a residue corresponding to position 274 in SEQ ID NO: 14;
(xlvi) the amino acid L, M, or T at a residue corresponding to position 288 in SEQ ID NO: 14;
(xlvii) the amino acid F at a residue corresponding to position 290 in SEQ ID NO: 14;
(xlviii) the amino acid R at a residue corresponding to position 296 in SEQ ID NO: 14;
(xlix) the amino acid Q at a residue corresponding to position 302 in SEQ ID NO: 14;
(l) the amino acid I at a residue corresponding to position 309 in SEQ ID NO: 14;
(li) the amino acid S at a residue corresponding to position 311 in SEQ ID NO: 14;
(lii) the amino acid L at a residue corresponding to position 318 in SEQ ID NO: 14;
(liii) the amino acid Q at a residue corresponding to position 329 in SEQ ID NO: 14;
(liv) the amino acid E at a residue corresponding to position 340 in SEQ ID NO: 14;
(lv) the amino acid Q at a residue corresponding to position 344 in SEQ ID NO: 14;
(lvi) the amino acid L or M at a residue corresponding to position 345 in SEQ ID NO: 14;
(lvii) the amino acid I at a residue corresponding to position 351 in SEQ ID NO: 14;
(lviii) the amino acid F at a residue corresponding to position 354 in SEQ ID NO: 14;
(lix) the amino acid Y at a residue corresponding to position 360 in SEQ ID NO: 14;
(lx) the amino acid D at a residue corresponding to position 361 in SEQ ID NO: 14;
(lxi) the amino acid T at a residue corresponding to position 363 in SEQ ID NO: 14;
(lxii) the amino acid Q at a residue corresponding to position 377 in SEQ ID NO: 14;
(lxiii) the amino acid N at a residue corresponding to position 378 in SEQ ID NO: 14;
(lxiv) the amino acid A at a residue corresponding to position 379 in SEQ ID NO: 14;
(lxv) the amino acid K at a residue corresponding to position 382 in SEQ ID NO: 14;
(lxvi) the amino acid V at a residue corresponding to position 396 in SEQ ID NO: 14;
(lxvii) the amino acid V at a residue corresponding to position 411 in SEQ ID NO: 14;
(lxviii) the amino acid V at a residue corresponding to position 417 in SEQ ID NO: 14;
(lxix) the amino acid F at a residue corresponding to position 419 in SEQ ID NO: 14;
(lxx) the amino acid D at a residue corresponding to position 424 in SEQ ID NO: 14;
(lxxi) the amino acid I at a residue corresponding to position 443 in SEQ ID NO: 14;
(lxxii) the amino acid I at a residue corresponding to position 446 in SEQ ID NO: 14;
(lxxiii) the amino acid L at a residue corresponding to position 459 in SEQ ID NO: 14;
(lxxiv) the amino acid I at a residue corresponding to position 462 in SEQ ID NO: 14;
(lxxv) the amino acid N at a residue corresponding to position 464 in SEQ ID NO: 14;
(lxxvi) the amino acid M at a residue corresponding to position 469 in SEQ ID NO: 14;
(lxxvii) the amino acid K at a residue corresponding to position 475 in SEQ ID NO: 14;
(lxxviii) the amino acid M at a residue corresponding to position 479 in SEQ ID NO: 14;
(lxxix) the amino acid M at a residue corresponding to position 491 in SEQ ID NO: 14;
(lxxx) the amino acid N at a residue corresponding to position 492 in SEQ ID NO: 14;
(lxxxi) the amino acid D, E, F, or P at a residue corresponding to position 494 in SEQ ID NO: 14;
(lxxxii) the amino acid E or K at a residue corresponding to position 495 in SEQ ID NO: 14;
(lxxxiii) the amino acid Q at a residue corresponding to position 499 in SEQ ID NO: 14;
(lxxxiv) the amino acid D at a residue corresponding to position 528 in SEQ ID NO: 14;
(lxxxv) the amino acid L or R at a residue corresponding to position 542 in SEQ ID NO: 14;
(lxxxvi) the amino acid R at a residue corresponding to position 543 in SEQ ID NO: 14; and/or
(lxxxvii) the amino acid R at a residue corresponding to position 544 in SEQ ID NO: 14.

120. The non-naturally occurring TS of claim 117, wherein the TS comprises:
(i) the amino acid H or Q at a residue corresponding to position 36 in SEQ ID NO: 14;
(ii) the amino acid T at a residue corresponding to position 44 in SEQ ID NO: 14;
(iii) the amino acid T at a residue corresponding to position 47 in SEQ ID NO: 14;
(iv) the amino acid I at a residue corresponding to position 52 in SEQ ID NO: 14;
(v) the amino acid P or S at a residue corresponding to position 58 in SEQ ID NO: 14;
(vi) the amino acid I at a residue corresponding to position 85 in SEQ ID NO: 14,
(vii) the amino acid L at a residue corresponding to position 88 in SEQ ID NO: 14;
(viii) the amino acid D, E, or H at a residue corresponding to position 89 in SEQ ID NO: 14;
(ix) the amino acid G at a residue corresponding to position 95 in SEQ ID NO: 14;
(x) the amino acid I at a residue corresponding to position 129 in SEQ ID NO: 14;
(xi) the amino acid R at a residue corresponding to position 136 in SEQ ID NO: 14;
(xii) the amino acid Q at a residue corresponding to position 150 in SEQ ID NO: 14;
(xiii) the amino acid L at a residue corresponding to position 158 in SEQ ID NO: 14;
(xiv) the amino acid A at a residue corresponding to position 181 in SEQ ID NO: 14;
(xv) the amino acid D at a residue corresponding to position 211 in SEQ ID NO: 14;
(xvi) the amino acid S at a residue corresponding to position 237 in SEQ ID NO: 14;
(xvii) the amino acid V at a residue corresponding to position 242 in SEQ ID NO: 14;
(xviii) the amino acid R at a residue corresponding to position 247 in SEQ ID NO: 14;
(xix) the amino acid V at a residue corresponding to position 255 in SEQ ID NO: 14;
(xx) the amino acid N at a residue corresponding to position 267 in SEQ ID NO: 14;
(xxi) the amino acid E at a residue corresponding to position 268 in SEQ ID NO: 14;
(xxii) the amino acid V at a residue corresponding to position 273 in SEQ ID NO: 14;
(xxiii) the amino acid H at a residue corresponding to position 274 in SEQ ID NO: 14;
(xxiv) the amino acid L, M, or T at a residue corresponding to position 288 in SEQ ID NO: 14;
(xxv) the amino acid Q at a residue corresponding to position 302 in SEQ ID NO: 14;
(xxvi) the amino acid I at a residue corresponding to position 309 in SEQ ID NO: 14;
(xxvii) the amino acid L at a residue corresponding to position 318 in SEQ ID NO: 14;
(xxviii) the amino acid Q at a residue corresponding to position 329 in SEQ ID NO: 14;
(xxix) the amino acid E at a residue corresponding to position 340 in SEQ ID NO: 14;
(xxx) the amino acid Q at a residue corresponding to position 344 in SEQ ID NO: 14;
(xxxi) the amino acid L or M at a residue corresponding to position 345 in SEQ ID NO: 14;
(xxxii) the amino acid I at a residue corresponding to position 351 in SEQ ID NO: 14;
(xxxiii) the amino acid Y at a residue corresponding to position 360 in SEQ ID NO: 14;
(xxxiv) the amino acid D at a residue corresponding to position 361 in SEQ ID NO: 14;
(xxxv) the amino acid T at a residue corresponding to position 363 in SEQ ID NO: 14;
(xxxvi) the amino acid A at a residue corresponding to position 379 in SEQ ID NO: 14;
(xxxvii) the amino acid K at a residue corresponding to position 382 in SEQ ID NO: 14;
(xxxviii) the amino acid V at a residue corresponding to position 396 in SEQ ID NO: 14;
(xxxix) the amino acid F at a residue corresponding to position 419 in SEQ ID NO: 14;
(xl) the amino acid D at a residue corresponding to position 424 in SEQ ID NO: 14;
(xli) the amino acid I at a residue corresponding to position 443 in SEQ ID NO: 14;
(xlii) the amino acid L at a residue corresponding to position 459 in SEQ ID NO: 14;
(xliii) the amino acid I at a residue corresponding to position 462 in SEQ ID NO: 14;
(xliv) the amino acid N at a residue corresponding to position 464 in SEQ ID NO: 14;
(xlv) the amino acid M at a residue corresponding to position 469 in SEQ ID NO: 14;
(xlvi) the amino acid M at a residue corresponding to position 479 in SEQ ID NO: 14;
(xlvii) the amino acid M at a residue corresponding to position 491 in SEQ ID NO: 14;
(xlviii) the amino acid N at a residue corresponding to position 492 in SEQ ID NO: 14; and/or
(xlix) the amino acid Q at a residue corresponding to position 499 in SEQ ID NO: 14.

121. The non-naturally occurring TS of claim 119, wherein the TS comprises relative to SEQ ID NO: 14:
(i) R31Q, H56N, Q58S, M61S, I74T, N90V, H143E, A250P, S255V, V288L, T340E, F345L, E424D, Q475K, T492N, and P542L;
(ii) R31Q, V52I, H56N, Q58S, M61S, 174T, N90V, A250P, S255V, V288L, F345L, Q475K, and T492N;
(iii) R31Q, A47T, V52I, H56N, Q58S, M61S, 174T, N90V, H143E, A250P, S255V, V288L, T340E, F345L, Q475K, and T492N;
(iv) H56N, Q58S, M61S, 174T, N90V, H143E, A250D, S255V, V288L, F345L, Q475K, T492N, and A495E;
(v) R31Q, H56N, Q58S, M61S, I74T, N90V, H143E, A250P, S255V, V288L, Q475K, and T492N;
(vi) R31Q, A47T, H56N, Q58S, M61S, 174T, N90V, H143E, A250P, S255V, V288L, T340E, F345L, E424D, Q475K, and T492N;
(vii) A47T, H56N, Q58S, M61S, I74T, N90V, A250D, S255V, F345L, E424D, Q475K, and T492N;
(viii) R31Q, A47T, H56N, Q58S, M61S, I74T, N90V, A250P, S255V, V288L, T340E, F345L, Q475K, and T492N;
(ix) R31Q, A47T, H56N, Q58S, M61S, I74T, N90V, H143E, A250P, S255V, V288L, T340E, F345L, Q475K, and T492N;
(x) A47T, H56N, Q58S, M61S, 174T, N90V, A250D, S255V, F345L, Q475K, and T492N;
(xi) R31Q, A47T, H56N, Q58S, M61S, I74T, N90V, H143E, A250P, S255V, T340E, F345L, Q475K, and T492N;
(xii) R31Q, H56N, Q58S, M61S, I74T, N90V, A250P, S255V, V288L, F345L, E424D, Q475K, and T492N;
(xiii) R3 1Q, A47T, H56N, Q58S, M61S, I74T, N90V, A250P, S255V, T340E, F345L, E424D, Q475K, and T492N;
(xiv) A47T, H56N, Q58S, M61S, I74T, N90V, A250D, S255V, V288L, F345L, Q475K, and T492N;
(xv) H56N, Q58S, M61S, I74T, N90V, H143E, A250D, S255V, V288L, F345L, Q475K, and T492N; or
(xvi) R31Q, V52I, H56N, M61S, I74T, N90V, A250P, S255V, F345L, Q475K, and T492N.

122. The non-naturally occurring TS of claim 120, wherein the TS comprises relative to SEQ ID NO: 14:
(iv) M61S, N90V, A250D, S255V, Q475K, T492N, and A495E;
(v) H56N, M61S, I74T, N90V, A250P, S255V, T492N, and H494E; or
(vi) R31Q, H56N, I74T, N90V, A250P, S255V, Q475K, T492N, H494E, and A495E.

123. The host cell of any one of claims 117-122, wherein the TS comprises a sequence that is at least 90%, at least 95%, at least 97%, at least 98%, at least 99% identical, or is 100% identical to any one of SEQ ID NOs: 138, 140, 141, 144, 155, 158, 164, 178, 198-200, 203, 285-289, 290-313, 474-487, 490-491, 499, 501-502, 504-505, 512, 515-517, 521-522, 524, 526-529, 532, 534-536, 538, 542-545, 548-605, 698-802, 804-811, 813-815, 820, 824, 826, 828-832, 834, 837-838, 845, 848, 850-851, 876, and 884-913.

124. A non-naturally occurring terminal synthase (TS), wherein relative to the sequence of SEQ ID NO: 13, the TS comprises an amino acid substitution at one or more residues corresponding to positions 79, 90, 106, 150, 166, 184, 211, 216, 230, 263, 273, 283, 290, 292, 319, 322, 339, 353, 380, 386, 397, 407, 416, 418, 441, 442, 446, 479, 450, 452, 454, 467, 481, 486, 504, and/or 512 in SEQ ID NO: 13, and wherein the TS is capable of producing a CBD-type cannabinoid.

125. The non-naturally occurring TS of claim 124, wherein relative to the sequence of SEQ ID NO: 13, the TS further comprises an amino acid substitution at one or more residues corresponding to positions 31, 47, 49, 50, 56, 57, 58, 69, 89, 95, 100, 103, 116, 124, 143, 162, 167, 168, 171, 172, 175, 180, 196, 213, 250, 287, 343, 344, 376, 377, 378, 394, 410, 414, 415, 445, 490, 492, 517 and/or 542 in SEQ ID NO: 13.

126. The non-naturally occurring TS of claim 125, wherein the TS comprises:
(i) the amino acid Q at a residue corresponding to position 31 in SEQ ID NO: 13;
(ii) the amino acid A at a residue corresponding to position 47 in SEQ ID NO: 13,
(iii) the amino acid P at a residue corresponding to position 49 in SEQ ID NO: 13;
(iv) the amino acid N at a residue corresponding to position 50 in SEQ ID NO: 13;
(v) the amino acid H at a residue corresponding to position 56 in SEQ ID NO: 13;
(vi) the amino acid D at a residue corresponding to position 57 in SEQ ID NO: 13;
(vii) the amino acid Q at a residue corresponding to position 58 in SEQ ID NO: 13;
(viii) the amino acid R or Q at a residue corresponding to position 69 in SEQ ID NO: 13;
(ix) the amino acid G at a residue corresponding to position 79 in SEQ ID NO: 13;
(x) the amino acid N, D, E, Q, or R at a residue corresponding to position 89 in SEQ ID NO: 13;
(xi) the amino acid C at a residue corresponding to position 90 in SEQ ID NO: 13;
(xii) the amino acid A at a residue corresponding to position 95 in SEQ ID NO: 13;
(xiii) the amino acid A at a residue corresponding to position 100 in SEQ ID NO: 13;
(xiv) the amino acid H at a residue corresponding to position 103 in SEQ ID NO: 13;
(xv) the amino acid E at a residue corresponding to position 106 in SEQ ID NO: 13;
(xvi) the amino acid A or G at a residue corresponding to position 116 in SEQ ID NO: 13;
(xvii) the amino acid N or M at a residue corresponding to position 124 in SEQ ID NO: 13;
(xviii) the amino acid E at a residue corresponding to position 143 in SEQ ID NO: 13;
(xix) the amino acid Q at a residue corresponding to position 150 in SEQ ID NO: 13;
(xx) the amino acid I at a residue corresponding to position 162 in SEQ ID NO: 13;
(xxi) the amino acid S at a residue corresponding to position 166 in SEQ ID NO: 13;
(xxii) the amino acid K at a residue corresponding to position 167 in SEQ ID NO: 13;
(xxiii) the amino acid T at a residue corresponding to position 168 in SEQ ID NO: 13;
(xxiv) the amino acid F at a residue corresponding to position 171 in SEQ ID NO: 13;
(xxv) the amino acid P at a residue corresponding to position 172 in SEQ ID NO: 13;
(xxvi) the amino acid F at a residue corresponding to position 175 in SEQ ID NO: 13;
(xxvii) the amino acid G at a residue corresponding to position 180 in SEQ ID NO: 13;
(xxviii) the amino acid F at a residue corresponding to position 184 in SEQ ID NO: 13;
(xxix) the amino acid K at a residue corresponding to position 196 in SEQ ID NO: 13;
(xxx) the amino acid D at a residue corresponding to position 211 in SEQ ID NO: 13;
(xxxi) the amino acid N at a residue corresponding to position 213 in SEQ ID NO: 13;
(xxxii) the amino acid L at a residue corresponding to position 216 in SEQ ID NO: 13;
(xxxiii) the amino acid I at a residue corresponding to position 230 in SEQ ID NO: 13;
(xxxiv) the amino acid R at a residue corresponding to position 250 in SEQ ID NO: 13;
(xxxv) the amino acid L at a residue corresponding to position 263 in SEQ ID NO: 13;
(xxxvi) the amino acid H at a residue corresponding to position 273 in SEQ ID NO: 13;
(xxxvii) the amino acid P at a residue corresponding to position 283 in SEQ ID NO: 13;
(xxxviii) the amino acid T at a residue corresponding to position 287 in SEQ ID NO: 13;
(xxxix) the amino acid M or A at a residue corresponding to position 290 in SEQ ID NO: 13;
(xl) the amino acid M at a residue corresponding to position 292 in SEQ ID NO: 13;
(xli) the amino acid D or N at a residue corresponding to position 319 in SEQ ID NO: 13;
(xlii) the amino acid E at a residue corresponding to position 322 in SEQ ID NO: 13;
(xliii) the amino acid E at a residue corresponding to position 339 in SEQ ID NO: 13;
(xliv) the amino acid E at a residue corresponding to position 343 in SEQ ID NO: 13;
(xlv) the amino acid M at a residue corresponding to position 344 in SEQ ID NO: 13;
(xlvi) the amino acid M at a residue corresponding to position 353 in SEQ ID NO: 13;
(xlvii) the amino acid L, Y, A, G, N, P, R, S, T, or V at a residue corresponding to position 376 in SEQ ID NO: 13;
(xlviii) the amino acid F, P, or R at a residue corresponding to position 377 in SEQ ID NO: 13;
(xlix) the amino acid K, R, S, or T at a residue corresponding to position 378 in SEQ ID NO: 13;
(l) the amino acid Y at a residue corresponding to position 380 in SEQ ID NO: 13;
(li) the amino acid F at a residue corresponding to position 386 in SEQ ID NO: 13;
(lii) the amino acid E at a residue corresponding to position 394 in SEQ ID NO: 13;
(liii) the amino acid E or K at a residue corresponding to position 397 in SEQ ID NO: 13;
(liv) the amino acid E at a residue corresponding to position 407 in SEQ ID NO: 13;
(lv) the amino acid T or V at a residue corresponding to position 410 in SEQ ID NO: 13;
(lvi) the amino acid I, L, M, T, or V at a residue corresponding to position 414 in SEQ ID NO: 13;
(lvii) the amino acid M at a residue corresponding to position 415 in SEQ ID NO: 13;
(lviii) the amino acid F, I, or M at a residue corresponding to position 416 in SEQ ID NO: 13;
(lix) the amino acid F at a residue corresponding to position 418 in SEQ ID NO: 13;
(lx) the amino acid S or T at a residue corresponding to position 441 in SEQ ID NO: 13;
(lxi) the amino acid I at a residue corresponding to position 442 in SEQ ID NO: 13;
(lxii) the amino acid V or A at a residue corresponding to position 445 in SEQ ID NO: 13;
(lxiii) the amino acid T or V at a residue corresponding to position 446 in SEQ ID NO: 13;
(lxiv) the amino acid S at a residue corresponding to position 450 in SEQ ID NO: 13;
(lxv) the amino acid T at a residue corresponding to position 452 in SEQ ID NO: 13;
(lxvi) the amino acid A at a residue corresponding to position 454 in SEQ ID NO: 13;
(lxvii) the amino acid Y at a residue corresponding to position 467 in SEQ ID NO: 13;
(lxviii) the amino acid S or T at a residue corresponding to position 479 in SEQ ID NO: 13;
(lxix) the amino acid I, M, V, or Y at a residue corresponding to position 481 in SEQ ID NO: 13;
(lxx) the amino acid V at a residue corresponding to position 486 in SEQ ID NO: 13;
(lxxi) the amino acid T at a residue corresponding to position 490 in SEQ ID NO: 13;
(lxxii) the amino acid N at a residue corresponding to position 492 in SEQ ID NO: 13;
(lxxiii) the amino acid Q at a residue corresponding to position 504 in SEQ ID NO: 13;
(lxxiv) the amino acid N at a residue corresponding to position 512 in SEQ ID NO: 13;
(lxxv) the amino acid D at a residue corresponding to position 527 in SEQ ID NO: 13; and/or
(lxxvi) the amino acid M at a residue corresponding to position 542 in SEQ ID NO: 13.

127. The non-naturally occurring TS of claim 124, wherein the TS comprises:
(i) the amino acid G at a residue corresponding to position 79 in SEQ ID NO: 13;
(ii) the amino acid C at a residue corresponding to position 90 in SEQ ID NO: 13,
(iii) the amino acid E at a residue corresponding to position 106 in SEQ ID NO: 13;
(iv) the amino acid Q at a residue corresponding to position 150 in SEQ ID NO: 13;
(v) the amino acid S at a residue corresponding to position 166 in SEQ ID NO: 13;
(vi) the amino acid D at a residue corresponding to position 211 in SEQ ID NO: 13;
(vii) the amino acid N at a residue corresponding to position 213 in SEQ ID NO: 13;
(viii) the amino acid L at a residue corresponding to position 216 in SEQ ID NO: 13;
(ix) the amino acid I at a residue corresponding to position 230 in SEQ ID NO: 13;
(x) the amino acid L at a residue corresponding to position 263 in SEQ ID NO: 13;
(xi) the amino acid H at a residue corresponding to position 273 in SEQ ID NO: 13;
(xii) the amino acid P at a residue corresponding to position 283 in SEQ ID NO: 13;
(xiii) the amino acid T at a residue corresponding to position 287 in SEQ ID NO: 13,
(xiv) the amino acid M or A at a residue corresponding to position 290 in SEQ ID NO: 13;
(xv) the amino acid M at a residue corresponding to position 292 in SEQ ID NO: 13;
(xvi) the amino acid D or N at a residue corresponding to position 319 in SEQ ID NO: 13;
(xvii) the amino acid E at a residue corresponding to position 322 in SEQ ID NO: 13;
(xviii) the amino acid E at a residue corresponding to position 339 in SEQ ID NO: 13;
(xix) the amino acid E at a residue corresponding to position 343 in SEQ ID NO: 13;
(xx) the amino acid M at a residue corresponding to position 344 in SEQ ID NO: 13;
(xxi) the amino acid M at a residue corresponding to position 353 in SEQ ID NO: 13;
(xxii) the amino acid Y at a residue corresponding to position 380 in SEQ ID NO: 13;
(xxiii) the amino acid F at a residue corresponding to position 386 in SEQ ID NO: 13;
(xxiv) the amino acid E at a residue corresponding to position 394 in SEQ ID NO: 13;
(xxv) the amino acid E or K at a residue corresponding to position 397 in SEQ ID NO: 13;
(xxvi) the amino acid E at a residue corresponding to position 407 in SEQ ID NO: 13;
(xxvii) the amino acid F, I, or M at a residue corresponding to position 416 in SEQ ID NO: 13;
(xxviii) the amino acid F at a residue corresponding to position 418 in SEQ ID NO: 13;
(xxix) the amino acid S or T at a residue corresponding to position 441 in SEQ ID NO: 13;
(xxx) the amino acid I at a residue corresponding to position 442 in SEQ ID NO: 13;
(xxxi) the amino acid T or V at a residue corresponding to position 446 in SEQ ID NO: 13;
(xxxii) the amino acid S at a residue corresponding to position 450 in SEQ ID NO: 13;
(xxxiii) the amino acid S or T at a residue corresponding to position 479 in SEQ ID NO: 13;
(xxxiv) the amino acid I, M, V, or Y at a residue corresponding to position 481 in SEQ ID NO: 13,
(xxxv) the amino acid V at a residue corresponding to position 486 in SEQ ID NO: 13;
(xxxvi) the amino acid T at a residue corresponding to position 490 in SEQ ID NO: 13;
(xxxvii) the amino acid Q at a residue corresponding to position 504 in SEQ ID NO: 13; and/or
(xxxviii) the amino acid N at a residue corresponding to position 512 in SEQ ID NO: 13.

128. The non-naturally occurring TS of claim 125, wherein the TS comprises relative to SEQ ID NO: 13:
(i) K50N, G95A, N196K, H213N, T339E, Q343E, L344M, and A414V;
(ii) G95A, Y175F, T339E, Q343E, and A414V;
(iii) G95A, S116A, T339E, Q343E, A414V, and N527D;
(iv) G95A, E150Q, V162L, C180G, N196K, N211D, N273H, T339E, Q343E, and A414V;
(v) G95A, T339E, Q343E, Q376V, and A414V;
(vi) K50N, G95A, S100A, E150Q, V162L, C180G, N196K, N211D, H213N, S322E, T339E, Q343E, L344M, A414V, E452T, and I504Q;
(vii) G95A, N196K, T339E, Q343E, and A414V;
(viii) 50N, G95A, V103H, H213N, T339E, Q343E, L344M, and A414V;
(ix) G95A, T339E, Q343E, Q376R, and A414V; or
(x) K50N, H213N, L230I, T339E, Q343E, and L344M.

129. The non-naturally occurring TS of claim 125, wherein the TS comprises relative to SEQ ID NO: 13:
(i) K50N, H213N, L230I, T339E, Q343E, and L344M;
(ii) S100A, T339E, and Q343E;
(iii) T339E, Q343E, L344M, and N527D;
(iv) K50N, V162I, C180G, N196K, N21 ID, H213N, T339E, Q343E, and L344M;
(v) K50N, E150Q, V1621, C180G, N196K, N211D, H213N, T339E, Q343E, and L344M;
(vi) S116A, H213N, T339E, Q343E, L344M, and N527D;
(vii) N196K, T339E, and Q343E;
(viii) K50N, E150Q, V1621, A172P, C180G, N196K, N211D, H213N, T339E, Q343E, and L344M;
(ix) V216L, T339E, and Q343E;
(x) S116A, H213N, T339E, Q343E, and N527D;
(xi) S116A, T339E, Q343E, and N527D; or
(xii) T339E, Q343E, and Q376P.

130. The non-naturally occurring TS of any one of claims 124-129, wherein the TS comprises a sequence that is at least 90%, at least 95%, at least 97%, at least 98%, at least 99% identical or is 100% identical to any one of SEQ ID NOs: 143, 149, 151-153, 156, 160, 163, 165, 166, 168, 170-172, 175-180, 182-197, 201, 204, 205, 207-225, 464-473, 478-480, 484-485, 487-489, 492-498, 500, 503, 506-548, 550, 551-552, 556, 558, 565, 567, 569-570, 572-578, 582, 584, 586, 588, 591, 593-595, 597, 600, 602, 604, 605, 718, 755, 784, 786, 790-792, 794, 795, 798, 800, 801, 803, 804, 806-810, 812-821, 823, 825, 827-836, 838, 839, 841-868, 870-874, 875-879, 881, 883, 913-932, 939-941, 944, 945, 946, and 948.

131. A non-naturally occurring TS, wherein relative to the sequence of SEQ ID NO: 14, the TS comprises an amino acid substitution at one or more residues corresponding to positions 41, 47, 49, 51, 52, 56, 58, 61, 63, 95, 96, 103, 116, 129,136, 143, 158, 173, 181, 237, 242, 247, 257, 268, 273, 296, 302, 309, 311, 340, 344, 345, 351, 354, 360, 361, 363, 377, 378, 379, 382, 396, 411, 424, 425, 430, 442, 443, 446, 447, 459, 462, 464, 465, 469, 475, 479, 489, 491, 492, 493, 494, 496, 516, 524, 528, 542, 543, and/or 544 in SEQ ID NO: 14, and wherein the TS is capable of producing a CBC-type cannabinoid.

132. The non-naturally occurring TS of claim 131, wherein relative to the sequence of SEQ ID NO: 14, the TS further comprises an amino acid substitution at one or more residues corresponding to positions 31, 40, 46, 74, 90, 255, 288, 290, 318, and/or 495 in SEQ ID NO: 14.

133. The non-naturally occurring TS of claim 132, wherein the TS comprises:
(i) the amino acid Q at a residue corresponding to position 31 in SEQ ID NO: 14;
(ii) the amino acid E at a residue corresponding to position 40 in SEQ ID NO: 14;
(iii) the amino acid Y at a residue corresponding to position 41 in SEQ ID NO: 14;
(iv) the amino acid P at a residue corresponding to position 46 in SEQ ID NO: 14;
(v) the amino acid T at a residue corresponding to position 47 in SEQ ID NO: 14;
(vi) the amino acid A at a residue corresponding to position 49 in SEQ ID NO: 14;
(vii) the amino acid F at a residue corresponding to position 51 in SEQ ID NO: 14;
(viii) the amino acid I at a residue corresponding to position 52 in SEQ ID NO: 14;
(ix) the amino acid N at a residue corresponding to position 56 in SEQ ID NO: 14;
(x) the amino acid S at a residue corresponding to position 58 in SEQ ID NO: 14;
(xi) the amino acid S at a residue corresponding to position 61 in SEQ ID NO: 14,
(xii) the amino acid V or L at a residue corresponding to position 63 in SEQ ID NO: 14;
(xiii) the amino acid T at a residue corresponding to position 74 in SEQ ID NO: 14,
(xiv) the amino acid V at a residue corresponding to position 90 in SEQ ID NO: 14;
(xv) the amino acid G at a residue corresponding to position 95 in SEQ ID NO: 14;
(xvi) the amino acid S at a residue corresponding to position 96 in SEQ ID NO: 14;
(xvii) the amino acid I at a residue corresponding to position 103 in SEQ ID NO: 14,
(xviii) the amino acid S at a residue corresponding to position 116 in SEQ ID NO: 14;
(xix) the amino acid I at a residue corresponding to position 129 in SEQ ID NO: 14;
(xx) the amino acid R at a residue corresponding to position 136 in SEQ ID NO: 14;
(xxi) the amino acid E at a residue corresponding to position 143 in SEQ ID NO: 14;
(xxii) the amino acid L at a residue corresponding to position 158 in SEQ ID NO: 14;
(xxiii) the amino acid A at a residue corresponding to position 173 in SEQ ID NO: 14;
(xxiv) the amino acid A at a residue corresponding to position 181 in SEQ ID NO: 14;
(xxv) the amino acid S at a residue corresponding to position 237 in SEQ ID NO: 14;
(xxvi) the amino acid V at a residue corresponding to position 242 in SEQ ID NO: 14;
(xxvii) the amino acid R at a residue corresponding to position 247 in SEQ ID NO: 14;
(xxviii) the amino acid V at a residue corresponding to position 255 in SEQ ID NO: 14;
(xxix) the amino acid M at a residue corresponding to position 257 in SEQ ID NO: 14;
(xxx) the amino acid E at a residue corresponding to position 268 in SEQ ID NO: 14;
(xxxi) the amino acid V at a residue corresponding to position 273 in SEQ ID NO: 14;
(xxxii) the amino acid L at a residue corresponding to position 288 in SEQ ID NO: 14;
(xxxiii) the amino acid F at a residue corresponding to position 290 in SEQ ID NO: 14;
(xxxiv) the amino acid R at a residue corresponding to position 296 in SEQ ID NO: 14;
(xxxv) the amino acid Q at a residue corresponding to position 302 in SEQ ID NO: 14;
(xxxvi) the amino acid I at a residue corresponding to position 309 in SEQ ID NO: 14;
(xxxvii) the amino acid S at a residue corresponding to position 311 in SEQ ID NO: 14;
(xxxviii) the amino acid L at a residue corresponding to position 318 in SEQ ID NO: 14;
(xxxix) the amino acid E at a residue corresponding to position 340 in SEQ ID NO: 14;
(xl) the amino acid Q at a residue corresponding to position 344 in SEQ ID NO: 14;
(xli) the amino acid L at a residue corresponding to position 345 in SEQ ID NO: 14;
(xlii) the amino acid I at a residue corresponding to position 351 in SEQ ID NO: 14;
(xliii) the amino acid F at a residue corresponding to position 354 in SEQ ID NO: 14;
(xliv) the amino acid Y at a residue corresponding to position 360 in SEQ ID NO: 14;
(xlv) the amino acid D at a residue corresponding to position 361 in SEQ ID NO: 14;
(xlvi) the amino acid T at a residue corresponding to position 363 in SEQ ID NO: 14;
(xlvii) the amino acid Q at a residue corresponding to position 377 in SEQ ID NO: 14;
(xlviii) the amino acid N at a residue corresponding to position 378 in SEQ ID NO: 14;
(xlix) the amino acid A at a residue corresponding to position 379 in SEQ ID NO: 14;
(l) the amino acid S at a residue corresponding to position 382 in SEQ ID NO: 14;
(li) the amino acid V at a residue corresponding to position 396 in SEQ ID NO: 14;
(lii) the amino acid V at a residue corresponding to position 411 in SEQ ID NO: 14;
(liii) the amino acid D at a residue corresponding to position 424 in SEQ ID NO: 14;
(liv) the amino acid K at a residue corresponding to position 425 in SEQ ID NO: 14;
(lv) the amino acid T at a residue corresponding to position 430 in SEQ ID NO: 14;
(lvi) the amino acid I at a residue corresponding to position 442 in SEQ ID NO: 14;
(lvii) the amino acid I or V at a residue corresponding to position 443 in SEQ ID NO: 14;
(lviii) the amino acid I at a residue corresponding to position 446 in SEQ ID NO: 14;
(lix) the amino acid C at a residue corresponding to position 447 in SEQ ID NO: 14;
(lx) the amino acid L at a residue corresponding to position 459 in SEQ ID NO: 14;
(lxi) the amino acid I at a residue corresponding to position 462 in SEQ ID NO: 14;
(lxii) the amino acid N at a residue corresponding to position 464 in SEQ ID NO: 14;
(lxiii) the amino acid I at a residue corresponding to position 465 in SEQ ID NO: 14;
(lxiv) the amino acid M at a residue corresponding to position 469 in SEQ ID NO: 14;
(lxv) the amino acid K at a residue corresponding to position 475 in SEQ ID NO: 14;
(lxvi) the amino acid M at a residue corresponding to position 479 in SEQ ID NO: 14;
(lxvii) the amino acid I at a residue corresponding to position 489 in SEQ ID NO: 14;
(lxviii) the amino acid I at a residue corresponding to position 491 in SEQ ID NO: 14;
(lxix) the amino acid N at a residue corresponding to position 492 in SEQ ID NO: 14;
(lxx) the amino acid D at a residue corresponding to position 493 in SEQ ID NO: 14;
(lxxi) the amino acid F or P at a residue corresponding to position 494 in SEQ ID NO: 14;
(lxxii) the amino acid E or K at a residue corresponding to position 495 in SEQ ID NO: 14;
(lxxiii) the amino acid N at a residue corresponding to position 496 in SEQ ID NO: 14;
(lxxiv) the amino acid D at a residue corresponding to position 516 in SEQ ID NO: 14;
(lxxv) the amino acid L at a residue corresponding to position 524 in SEQ ID NO: 14;
(lxxvi) the amino acid D at a residue corresponding to position 528 in SEQ ID NO: 14;
(lxxvii) the amino acid L or R at a residue corresponding to position 542 in SEQ ID NO: 14;
(lxxviii) the amino acid R at a residue corresponding to position 543 in SEQ ID NO: 14; and/or
(lxxix) the amino acid R at a residue corresponding to position 544 in SEQ ID NO: 14.

134. The non-naturally occurring TS of claim 131, wherein the TS comprises:
(i) the amino acid Y at a residue corresponding to position 41 in SEQ ID NO: 14;
(ii) the amino acid T at a residue corresponding to position 47 in SEQ ID NO: 14;
(iii) the amino acid A at a residue corresponding to position 49 in SEQ ID NO: 14;
(iv) the amino acid F at a residue corresponding to position 51 in SEQ ID NO: 14;
(v) the amino acid I at a residue corresponding to position 52 in SEQ ID NO: 14;
(vi) the amino acid N at a residue corresponding to position 56 in SEQ ID NO: 14;
(vii) the amino acid S at a residue corresponding to position 58 in SEQ ID NO: 14;
(viii) the amino acid S at a residue corresponding to position 61 in SEQ ID NO: 14;
(ix) the amino acid V or L at a residue corresponding to position 63 in SEQ ID NO: 14;
(x) the amino acid G at a residue corresponding to position 95 in SEQ ID NO: 14;
(xi) the amino acid S at a residue corresponding to position 96 in SEQ ID NO: 14;
(xii) the amino acid I at a residue corresponding to position 103 in SEQ ID NO: 14;
(xiii) the amino acid S at a residue corresponding to position 116 in SEQ ID NO: 14;
(xiv) the amino acid I at a residue corresponding to position 129 in SEQ ID NO: 14;
(xv) the amino acid R at a residue corresponding to position 136 in SEQ ID NO: 14;
(xvi) the amino acid E at a residue corresponding to position 143 in SEQ ID NO: 14;
(xvii) the amino acid L at a residue corresponding to position 158 in SEQ ID NO: 14;
(xviii) the amino acid A at a residue corresponding to position 173 in SEQ ID NO: 14;
(xix) the amino acid A at a residue corresponding to position 181 in SEQ ID NO: 14;
(xx) the amino acid S at a residue corresponding to position 237 in SEQ ID NO: 14;
(xxi) the amino acid V at a residue corresponding to position 242 in SEQ ID NO: 14;
(xxii) the amino acid R at a residue corresponding to position 247 in SEQ ID NO: 14;
(xxiii) the amino acid M at a residue corresponding to position 257 in SEQ ID NO: 14;
(xxiv) the amino acid E at a residue corresponding to position 268 in SEQ ID NO: 14;
(xxv) the amino acid V at a residue corresponding to position 273 in SEQ ID NO: 14;
(xxvi) the amino acid R at a residue corresponding to position 296 in SEQ ID NO: 14;
(xxvii) the amino acid Q at a residue corresponding to position 302 in SEQ ID NO: 14;
(xxviii) the amino acid I at a residue corresponding to position 309 in SEQ ID NO: 14;
(xxix) the amino acid S at a residue corresponding to position 311 in SEQ ID NO: 14;
(xxx) the amino acid E at a residue corresponding to position 340 in SEQ ID NO: 14;
(xxxi) the amino acid Q at a residue corresponding to position 344 in SEQ ID NO: 14;
(xxxii) the amino acid L at a residue corresponding to position 345 in SEQ ID NO: 14;
(xxxiii) the amino acid I at a residue corresponding to position 351 in SEQ ID NO: 14;
(xxxiv) the amino acid F at a residue corresponding to position 354 in SEQ ID NO: 14;
(xxxv) the amino acid Y at a residue corresponding to position 360 in SEQ ID NO: 14;
(xxxvi) the amino acid D at a residue corresponding to position 361 in SEQ ID NO: 14;
(xxxvii) the amino acid T at a residue corresponding to position 363 in SEQ ID NO: 14;
(xxxviii) the amino acid Q at a residue corresponding to position 377 in SEQ ID NO: 14;
(xxxix) the amino acid N at a residue corresponding to position 378 in SEQ ID NO: 14;
(xl) the amino acid A at a residue corresponding to position 379 in SEQ ID NO: 14;
(xli) the amino acid S at a residue corresponding to position 382 in SEQ ID NO: 14;
(xlii) the amino acid V at a residue corresponding to position 396 in SEQ ID NO: 14;
(xliii) the amino acid V at a residue corresponding to position 411 in SEQ ID NO: 14;
(xliv) the amino acid D at a residue corresponding to position 424 in SEQ ID NO: 14;
(xlv) the amino acid K at a residue corresponding to position 425 in SEQ ID NO: 14;
(xlvi) the amino acid T at a residue corresponding to position 430 in SEQ ID NO: 14;
(xlvii) the amino acid I at a residue corresponding to position 442 in SEQ ID NO: 14;
(xlviii) the amino acid I or V at a residue corresponding to position 443 in SEQ ID NO: 14;
(xlix) the amino acid I at a residue corresponding to position 446 in SEQ ID NO: 14;
(l) the amino acid C at a residue corresponding to position 447 in SEQ ID NO: 14;
(li) the amino acid L at a residue corresponding to position 459 in SEQ ID NO: 14;
(lii) the amino acid I at a residue corresponding to position 462 in SEQ ID NO: 14;
(liii) the amino acid N at a residue corresponding to position 464 in SEQ ID NO: 14;
(liv) the amino acid I at a residue corresponding to position 465 in SEQ ID NO: 14;
(lv) the amino acid M at a residue corresponding to position 469 in SEQ ID NO: 14;
(lvi) the amino acid K at a residue corresponding to position 475 in SEQ ID NO: 14;
(lvii) the amino acid M at a residue corresponding to position 479 in SEQ ID NO: 14;
(lviii) the amino acid I at a residue corresponding to position 489 in SEQ ID NO: 14;
(lix) the amino acid I at a residue corresponding to position 491 in SEQ ID NO: 14;
(lx) the amino acid N at a residue corresponding to position 492 in SEQ ID NO: 14;
(lxi) the amino acid D at a residue corresponding to position 493 in SEQ ID NO: 14;
(lxii) the amino acid F or P at a residue corresponding to position 494 in SEQ ID NO: 14;
(lxiii) the amino acid N at a residue corresponding to position 496 in SEQ ID NO: 14;
(lxiv) the amino acid D at a residue corresponding to position 516 in SEQ ID NO: 14;
(lxv) the amino acid L at a residue corresponding to position 524 in SEQ ID NO: 14;
(lxvi) the amino acid D at a residue corresponding to position 528 in SEQ ID NO: 14;
(lxvii) the amino acid L or R at a residue corresponding to position 542 in SEQ ID NO: 14;
(lxviii) the amino acid R at a residue corresponding to position 543 in SEQ ID NO: 14; and/or
(lxix) the amino acid R at a residue corresponding to position 544 in SEQ ID NO: 14.

135. The non-naturally occurring TS of claim 132, where the TS comprises relative to SEQ ID NO: 14:
(i) Q58S, V288L, and F345L;
(ii) R31Q, V52I, H56N, Q58S, M61S, I74T, N90V, A250P, S255V, F345L, Q475K, and T492N;
(iii) R31Q, H56N, I74T, N90V, H143E, A250P, S255V, Q475K, and T492N;
(iv) R31Q, H56N, I74T, N90V, A250P, S255V, L443I, Q475K, and T492N;
(v) H56N, M61S, N90V, A250D, S255V, V288L, Q475K, T492N, and A495E;
(vi) R31Q, H56N, I74T, N90V, K215R, A250P, S255V, Q475K, and T492N;
(vii) R31Q, P49A, H56N, Q58S, M61S, 174T, N90V, H143E, A250P, S255V, V288L, F345L, Q475K, and T492N;
(viii) R31Q, A47T, H56N, 174T, N90V, A250P, S255V, Q475K, and T492N;
(ix) M61S, N90V, A250D, S255V, Q475K, T492N, A495E, and N498T;
(x) R31Q, H56N, M61S, 174T, N89H, N90V, S100A, H136R, E150Q, N196K, N21 ID, A250P, S255V, V288M, F345M, S382K, L443L, Q475K, and T492N;
(xi) R31Q, H56N, Q58S, M61S, I74T, N90V, H143E, A250P, S255V, V288L, T340E, F345L, E424D, Q475K, and T492N;
(xii) R31Q, H56N, I74T, S88L, N90V, A250P, S255V, Q475K, and T492N;
(xiii) R31Q, V52I, H56N, Q58S, M61S, I74T, N90V, H143E, A250P, S255V, V288L, F345L, Q475K, and T492N;
(xiv) R31Q, H56N, Q58S, M61S, 174T, N90V, H143E, A250P, S255V, V288L, T340E, F345L, E424D, Q475K, and T492N;
(xv) R31Q, H56N, Q58S, M61S, I74T, N90V, H143E, A250P, S255V, V288L, F345L, A411V, Q475K, and T492N;
(xvi) R31Q, V52I, H56N, Q58S, M61S, I74T, N90V, A250P, S255V, V288L, F345L, Q475K, and T492N;
(xvii) R31Q, K50L, H56N, I74T, N90V, A250P, S255V, Q475K, and T492N;
(xviii) R31Q, A47T, V52I, H56N, Q58S, M61S, I74T, N90V, H143E, A250P, S255V, V288L, T340E, F345L, Q475K, and T492N; or
(xix) R31Q, H56N, M61S, 174T, N89H, N90V, S100A, N196K, N211D, A250P, S255V, I257R, V288M, F345M, S382K, L443I, Q475K, and T492N.

136. The non-naturally occurring TS of any one of claims 131-135, wherein the TS comprises a sequence that is at least 90%, at least 95% at least 97%, at least 98%, at least 99%4 identical or is 100%/o identical to any one of SEQ ID NOs: 137-140, 142-143, 145-150, 154, 157, 159, 161, 162, 164, 167, 169, 173, 174, 177-193, 195, 196, 199, 204-206, 464-466, 488, 489, 492-498, 500, 502, 503, 506, 507-548, 550, 551, 552, 565, 574, 595, 597, 602, 698-882, and 993.

137. A non-naturally occurring nucleic acid encoding a terminal synthase (TS), wherein the non-naturally occurring nucleic acid comprises a sequence that is at least 90%, at least 95% at least 97%, at least 98%, at least 99% identical to any one of SEQ ID NOs: 46-134, 194-222, 322-463, 954-1189, 1195-1197, 1201, 1202, and 1204.

138. The non-naturally occurring nucleic acid of claim 137, wherein the non-naturally occurring nucleic acid comprises the sequence of any one of SEQ ID NOs: 46-134, 194-222, 322-463, 954-1189, 1195-1197, 1201, 1202, and 1204.

139. A vector comprising the non-naturally occurring nucleic acid of claim 137 or 138.

140. An expression cassette comprising the non-naturally occurring nucleic acid of claim 137 or 138.

141. A host cell transformed with the non-naturally occurring nucleic acid of claim 137 or 138, the vector of claim 139, or the expression cassette of claim 140.

142. A bioreactor for producing a cannabinoid, wherein the bioreactor contains a CBG-type cannabinoid and a terminal synthase (TS), wherein relative to the sequence of SEQ ID NO: 14, the TS comprises an amino acid substitution at one or more residues corresponding to positions 31, 36, 40, 41, 44, 46, 47, 49, 51, 52, 56, 58, 59, 61, 63, 74, 76, 85, 88, 89, 90, 95, 96, 100, 103, 116, 129, 136, 143, 150, 158, 173, 181, 196, 211, 237, 242, 247, 250, 255, 257, 267, 268, 273, 274, 288, 290, 296, 302, 309, 311, 318, 329, 340, 344, 345, 351, 354, 360, 361, 363, 377, 378, 379, 382, 396, 411, 417, 419, 424, 443, 446, 459, 462, 464, 469, 479, 475, 491, 492, 494, 495, 499, 528, 542, 543, and/or 544 in SEQ ID NO: 14, wherein the TS does not comprise the sequence of SEQ ID NO: 20, 21, 320 or 321.

143. A bioreactor for producing a cannabinoid, wherein the bioreactor contains a CBG-type cannabinoid and a terminal synthase (TS), wherein relative to the sequence of SEQ ID NO: 13, the TS comprises an amino acid substitution at one or more residues corresponding to positions 31, 47, 49, 50, 56, 57, 58, 69, 79, 89, 90, 95, 100, 103, 106, 116, 124, 143, 150, 162, 166, 167, 168, 171, 172, 175, 180, 184, 196, 211, 213, 216, 230, 250, 263, 273, 283, 287, 290, 292, 319, 322, 339, 343, 344, 353, 376, 377, 378, 380, 386, 394, 397, 407, 410, 414, 415, 416, 418, 441, 442, 445, 446, 479, 450, 452, 454, 467, 481, 486, 490, 492, 504, 512, 527 and/or 542 in SEQ ID NO: 13.

144. A bioreactor for producing a cannabinoid, wherein the bioreactor contains a CBG-type cannabinoid and a terminal synthase (TS), wherein relative to the sequence of SEQ ID NO: 14, the TS comprises an amino acid substitution at one or more residues corresponding to positions 31, 40, 41, 46, 47, 49, 51, 52, 56, 58, 61, 63, 74, 90, 95, 96, 103, 116, 129, 136, 143, 158, 173, 181, 237, 242, 247, 255, 257, 268, 273, 288, 290, 296, 302, 309, 311, 318, 340, 344, 345, 351, 354, 360, 361, 363, 377, 378, 379, 382, 396, 411, 424, 425, 430, 442, 443, 446, 447, 459, 462, 464, 465, 469, 475, 479, 489, 491, 492, 493, 494, 495, 496, 516, 524, 528, 542, 543, and/or 544 in SEQ ID NO: 14, wherein the TS is capable of producing more of a CBC-type cannabinoid than a control TS, and wherein the control TS comprises the sequence of SEQ ID NO: 21.

145. A bioreactor for producing a cannabinoid, wherein the bioreactor contains a CBG-type cannabinoid and a host cell of any one of claims 1-123.
